(19) United States
(12) Patent Application Publication
(10) Pub. No.: US 2023/0348910 A1
(43) Pub. Date: Nov. 2, 2023

(54) COMPOSITIONS AND METHODS FOR GENETIC MODIFICATION AND TARGETING

(71) Applicant: Qihan-eGenesis Hong Kong Limited, Wanchai (CN)

(72) Inventors: Luhan Yang, Hangzhou City (CN); Yangbin Gao, Hangzhou City (CN)

(21) Appl. No.: 18/188,315

(22) Filed: Mar. 22, 2023

Related U.S. Application Data
(63) Continuation of application No. PCT/CN2021/119839, filed on Sep. 23, 2021.

(30) Foreign Application Priority Data
Sep. 23, 2020 (WO) PCT/CN2020/117169

(51) Int. Cl. C12N 15/113; C12N 15/11; C12N 15/90; C12N 9/22

(52) U.S. Cl. CPC C12N 15/1131; C12N 15/11; C12N 15/907; C12N 9/22; C12N 2310/20

(57) ABSTRACT

Described herein are compositions and methods for modifying and targeting genes. Also described herein are compositions and methods for modifying and targeting genes in a cell or a non-human mammal.

### CROSS REFERENCE

[0001] This application is a continuation of International Patent Application No. PCT/CN2021/119839, filed on Sep. 23, 2021, which claims benefit to International Patent Application No. PCT/CN2020/117169, filed on Sep. 23, 2020, each of which is hereby incorporated by reference in its entirety.

### SEQUENCE LISTING

[0002] The instant application contains a Sequence Listing which has been submitted electronically in XML format and is hereby incorporated by reference in its entirety. Said XML copy, created on Jul. 5, 2023, is named 54809-705_301_SL.xml and is 13,513,050 bytes in size.

### INCORPORATION BY REFERENCE

[0003] All publications, patents, and patent applications mentioned in this specification are herein incorporated by reference to the same extent as if each individual publication, patent, or patent application was specifically and individually indicated to be incorporated by reference.

### BACKGROUND

[0004] Treating and preventing viral infection and disease presents one of the most pressing challenges for modern medicine. The damage of viral infection and disease is wide ranging. For example, billions of dollars are lost annually due to viral infection and disease in crops and livestock.

[0005] Genetical modification have been utilized to combat viral infections. Genetic modification can involve manipulations of a gene, including adding, deleting, or replacing a target gene or a part thereof at a single or multiple loci within the genome. Such approach can confer or enhance resistance to viral infection by genetically modifying the gene encoding the protein that the virus utilizes for gaining entry into the cell. However, conferring or enhancing resistance to viral infection via gene editing can be expensive, time-consuming, and sometimes ineffective. Also, genetic modification for resistance for one type of viral infection does not guard against other types of viral infections.

### SUMMARY

[0006] The present disclosure provides cells, tissues, organs, and non-human mammals comprising genetic modifications that result in enhanced resistance to viral infections. Also disclosed herein are cells, tissues, organs, and non-human mammals comprising genetic modifications to enhance resistances to infections caused by multiple strains of virus.

[0007] Described herein is a genetically modified cell exhibiting enhanced resistance to viral infection as compared to a control cell, the genetically modified cell comprising at least one modified chromosomal sequence in a gene encoding CD163, wherein the at least one chromosomal sequence is selected from the group consisting of: exon 1, exon 2, exon 3, exon 4, exon 5, exon 6, exon 10, exon 11, exon 12, exon 13, exon 14, exon 15, exon 16, exon 17, intron 1, intron 2, intron 3, intron 4, intron 5, intron 9, intron 10, intron 11, intron 12, intron 13, intron 14, intron 15, and intron 16. In some embodiments, the at least one chromosomal sequence of CD163 is selected from the group consisting of: exon 1, exon 2, exon 3, exon 4, exon 5, exon 6, exon 10, exon 11, exon 12, exon 13, intron 1, intron 2, intron 3, intron 4, intron 5, intron 9, intron 10, intron 11, intron 12, and intron 13. In some embodiments, the at least one chromosomal sequence of CD163 is selected from the group consisting of: exon 4, intron 3, and intron 4. In some embodiments, the genetically modified cell exhibits reduced expression or activity of CD163. In some embodiments, the at least one modified chromosomal sequence of CD163 comprises a frameshift mutation. In some embodiments, the genetically modified cell comprising the modified CD163 exhibits enhanced resistance to PRRSV and ASFV. In some embodiments, the genetically modified cell comprising the modified CD163 exhibits enhanced resistance to PRRSV. In some embodiments, the genetically modified cell comprising modified CD163 exhibits enhanced resistance to ASFV.

[0008] Described herein is a genetically modified non-human mammal exhibiting enhanced resistance to viral infection, said genetically modified non-human mammal comprising the genetically modified cell comprising modified CD163 described herein. In some embodiments, the genetically modified non-human mammal is an artiodactyl. In some embodiments, the artiodactyl is a pig. In some embodiments, the genetically modified non-human mammal exhibits enhanced resistance to PRRSV and ASFV. In some embodiments, the genetically modified non-human mammal comprising the modified CD163 exhibits enhanced resistance to PRRSV. In some embodiments, the genetically modified non-human mammal comprising modified CD163 exhibits enhanced resistance to ASFV.

[0009] Described herein is a method of genetically modifying a cell or a non-human mammal to induce enhanced resistance to viral infection, said method comprising generating the at least one modified chromosomal sequence of CD163 in a genetically modified cell or non-human mammal. In some embodiments, the method comprises generating the at least one modified chromosome sequence of CD163, where the modified CD163 enhances resistance to viral infection to PRRSV and ASFV in the genetically modified cell or non-human mammal compared to a control cell or non-human mammal, where the CD163 is not modified. In some embodiments, the method comprises generating the at least one modified chromosome sequence of CD163, where the modified CD163 enhances resistance to viral infection to PRRSV in the genetically modified cell or non-human mammal compared to a control cell or non-human mammal, where the CD163 is not modified. In some embodiments, the method comprises generating the at least one modified chromosome sequence of CD163, where the modified CD163 enhances resistance to viral infection to ASFV in the genetically modified cell or non-human mammal compared to a control cell or non-human mammal, where the CD163 is not modified. In some embodiments, the genetically modified cell comprising at least one modified chromosomal sequence in a gene encoding CD163, wherein the at least one chromosomal sequence is selected from the group consisting of: exon 1, exon 2, exon 3, exon 4, exon 5, exon 6, exon 10, exon 11, exon 12, exon 13, exon 14, exon 15, exon 16, exon 17, intron 1, intron 2, intron 3, intron 4, intron 5, intron 9, intron 10, intron 11, intron 12, intron 13, intron 14, intron 15, and intron 16. In some embodiments, the at least one chromosomal sequence of CD163 is selected from the group consisting of: exon 1, exon 2, exon 3, exon 4, exon 5, exon 6, exon 10, exon 11, exon 12, exon 13, intron 1, intron 2, intron 3, intron 4, intron 5, intron 9, intron 10, intron 11, intron 12, and intron 13. In some embodiments, the at least one chromosomal sequence of CD163 is selected from the group consisting of: exon 4, intron 3, and intron 4. In some embodiments, the genetically modified cell exhibits reduced expression or activity of CD163. In some embodiments, the at least one modified chromosomal sequence of CD163 comprises a frameshift mutation. In some embodiments, the genetically modified cell comprising the modified CD163 exhibits enhanced resistance to PRRSV and ASFV. In some embodiments, the genetically modified cell comprising the modified CD163 exhibits enhanced resistance to PRRSV. In some embodiments, the genetically modified cell comprising modified CD163 exhibits enhanced resistance to ASFV.

[0010] Described herein is a genetically modified cell exhibiting enhanced resistance to viral infection by at least two genera of virus as compared to a control cell, the genetically modified cell comprising the modified genetic content of one or more endogenous genes to said modified cell, which modified genetic content renders the enhanced resistance. In some embodiments, the genetically modified cell comprises at least one gene regulating moiety capable of targeting the one or more endogenous genes, to generate the modified genetic content of the one or more endogenous genes. In some embodiments, a gene encoding the at least one gene regulating moiety is integrated into a genome of the genetically modified cell. In some embodiments, the one or more endogenous genes comprises a first endogenous gene and a second endogenous gene, and wherein the at least one gene regulating moiety comprises (i) a first guide nucleic acid molecule capable of targeting the first endogenous gene and (ii) a second guide nucleic acid molecule capable of targeting the second endogenous gene. In some embodiments, the one or more endogenous genes comprises a target endogenous gene, and wherein the at least one gene regulating moiety comprises (i) a first guide nucleic acid molecule capable of targeting a first portion of the target endogenous gene and (ii) a second guide nucleic acid molecule capable of targeting a second portion of the target endogenous gene. In some embodiments, the modified genetic content comprises a chromosomal gene or a transcript thereof. In some embodiments, the one or more endogenous genes encode one or more proteins selected from the group consisting of: a receptor protein, a peptidase protein, a glycosyltransferase protein, a hydroxylase protein, and an interferon-stimulated gene (ISG) protein. In some embodiments, the receptor protein is CD163. In some embodiments, the peptidase protein is ANPEP. In some embodiments, the glycosyltransferase protein is GGTA1. In some embodiments, the glycosyltransferase protein is CMAH. In some embodiments, the hydroxylase protein is B4HALNT2. In some embodiments, the ISG protein is RELA. In some embodiments, the one or more endogenous genes encode at least two proteins selected from the group consisting of: CD163, ANPEP, GGTA1, CMAH, B4GALNT2, and RELA. In some embodiments, the one or more endogenous genes encode CD163 and one or more proteins selected from the group consisting of: ANPEP, GGTA1, CMAH, B4GALNT2, and RELA. In some embodiments, the one or more endogenous genes encode ANPEP and one or more proteins selected from the group consisting of: CD163, GGTA1, CMAH, B4GALNT2, and RELA. In some embodiments, the one or more endogenous genes encode one or more proteins selected from the group consisting of: GGTA1, CMAH, and B4GALNT2; and CD163 or ANPEP. In some embodiments, the one or more endogenous genes encode one or more proteins selected from the group consisting of: RELA; and CD163 or ANPEP. In some embodiments, the genetically modified cell exhibits enhanced resistance to viral infection by at least three genera of virus as compared to the control cell, and wherein the one or more endogenous genes encode CD163 or ANPEP, and one or more genes selected from the group consisting of: GGTA1, CMAH, B4GALNT2, and RELA. In some embodiments, the genetically modified cell exhibits enhanced resistance to infection by the at least two genera of virus comprising two or more viruses selected from the group consisting of: Betaarterivirus (PRRSV), Alphacoronavirus (TGEV), and Asfivirus (ASFV).

[0011] Described herein is a genetically modified non-human mammal exhibiting enhanced resistance to viral infection by at least two genera of virus, comprising the genetically modified cell described here. In some embodiments, the genetically modified no-human mammal is an artiodactyl. In some embodiments, the artiodactyl is a pig.

[0012] Described herein is a method of genetically modifying a cell or a non-human mammal to induce enhanced resistance to viral infection by at least two genera of virus, said method comprising generating the modified genetic content described herein. In some embodiments, the genetically modified cell comprises at least one gene regulating moiety capable of targeting the one or more endogenous genes, to generate the modified genetic content of the one or more endogenous genes. In some embodiments, a gene encoding the at least one gene regulating moiety is integrated into a genome of the genetically modified cell. In some embodiments, the one or more endogenous genes comprises a first endogenous gene and a second endogenous gene, and wherein the at least one gene regulating moiety comprises (i) a first guide nucleic acid molecule capable of targeting the first endogenous gene and (ii) a second guide nucleic acid molecule capable of targeting the second endogenous gene. In some embodiments, the one or more endogenous genes comprises a target endogenous gene, and wherein the at least one gene regulating moiety comprises (i) a first guide nucleic acid molecule capable of targeting a first portion of the target endogenous gene and (ii) a second guide nucleic acid molecule capable of targeting a second portion of the target endogenous gene. In some embodiments, the modified genetic content comprises a chromosomal gene or a transcript thereof. In some embodiments, the one or more endogenous genes encode one or more proteins selected from the group consisting of: a receptor protein, a peptidase protein, a glycosyltransferase protein, a hydroxylase protein, and an interferon-stimulated gene (ISG) protein. In some embodiments, the receptor protein is CD163. In some embodiments, the peptidase protein is ANPEP. In some embodiments, the glycosyltransferase protein is GGTA1. In some embodiments, the glycosyltransferase protein is CMAH. In some embodiments, the hydroxylase protein is B4HALNT2. In some embodiments, the ISG protein is RELA. In some embodiments, the one or more endogenous genes encode at least two proteins selected from the group consisting of: CD163, ANPEP, GGTA1, CMAH, B4GALNT2, and RELA. In some embodiments, the one or more endogenous genes encode CD163 and one or more proteins selected from the group consisting of: ANPEP, GGTA1, CMAH, B4GALNT2, and RELA. In some embodiments, the one or more endogenous genes encode ANPEP and one or more proteins selected from the group consisting of: CD163, GGTA1, CMAH, B4GALNT2, and RELA. In some embodiments, the one or more endogenous genes encode one or more proteins selected from the group consisting of: GGTA1, CMAH, and B4GALNT2; and CD163 or ANPEP. In some embodiments, the one or more endogenous genes encode one or more proteins selected from the group consisting of: RELA; and CD163 or ANPEP. In some embodiments, the genetically modified cell exhibits enhanced resistance to viral infection by at least three genera of virus as compared to the control cell, and wherein the one or more endogenous genes encode CD163 or ANPEP, and one or more genes selected from the group consisting of: GGTA1, CMAH, B4GALNT2, and RELA. In some embodiments, the genetically modified cell exhibits enhanced resistance to infection by the at least two genera of virus comprising two or more viruses selected from the group consisting of: Betaarterivirus (PRRSV), Alphacoronavirus (TGEV), and Asfivirus (ASFV).

[0013] Described herein is a composition for reducing viral infection by at least two families of virus, comprising: (a) one or more heterologous polypeptides comprising a nucleic acid-guided nuclease or a fragment thereof, and (b) at least two guide nucleic acids specifically binding to viral genes of the at least two families of virus, wherein components (a) and (b) form a complex configured to modify a genetic content of the viral genes. In some embodiments, the nucleic acid-guided nuclease is a Cas protein. In some embodiments, the Cas protein is a type V Cas. In some embodiments, the Cas protein is a type VI Cas. In some embodiments, the at least two families of virus comprise Coronaviridae, Arteriviridae, or Asfarviridae. In some embodiments, the viral genes comprise the viral genome or transcript thereof.

[0014] Described herein is a cell or a non-human mammal capable of reducing viral infection by at least two families of virus, comprising the composition described herein. Also described herein is a method of generating a cell capable of reducing viral infection by at least two families of virus, comprising contacting the cell with the composition described herein.

[0015] Described herein is a guide nucleic acid comprising a sequence of about 10 to 30 consecutive nucleotides, said sequence exhibiting at least 90% sequence identity to at least two different regions of a target viral gene. In some embodiments, the target viral gene comprises a viral genome or a transcript thereof. In some embodiments, the guide nucleic acid targets the at least two different regions within a same gene of the target viral gene. In some embodiments, the guide nucleic acid targets the at least two different regions that are in two different genes of the target viral gene. In some embodiments, the guide nucleic acid targets viral gene selected from the group consisting of: B602L, DP86L, DP93R, KP86R, KP93L, M1249L, G1221R, O174L, and CP204L (p30). In some embodiments, the guide nucleic acid targets viral gene selected from the group consisting of: B602L, DP86L, DP93R, KP86R, KP93L, M1249L, G1221R, and O174L. In some embodiments, the guide nucleic acid comprises a sequence that is least 90% identical to a sequence fragment of SEQ ID NO: 6. In some embodiments, the guide nucleic acid comprises sequence that is at least 90% identical to a sequence fragment of SEQ ID NO: 7. In some embodiments, the guide nucleic acid is at least 90% identical to a sequence selected from SEQ ID NOS: 10001-13274, SEQ ID NOS: 20001-23274, and SEQ ID NOS: 30001-33274. In some embodiments, the guide nucleic acid is at least 90% identical to a sequence selected from SEQ ID NOS: 10001, 10002, 10433, 10848, 12318, and 12266. In some embodiments, the guide nucleic acid is at least 90% identical to a sequence selected from SEQ ID NOS: 20001, 20002, 20433, 20848, 22318, and 22266. In some embodiments, the guide nucleic acid is at least 90% identical to a sequence selected from SEQ ID NOS: 30001, 30002, 30433, 30848, 32318, and 32266. In some embodiments, the guide nucleic acid targets ASFV viral genes.

[0016] Described here is a composition comprising: a heterologous polypeptide comprising a nucleic acid-guided nuclease or a fragment thereof, and at least one guide nucleic acid described herein. In some embodiments, the composition comprises at least two guide nucleic acids. In some embodiments, a cell or a non-human mammal comprises the composition. In some embodiments, describe herein is a method of reducing infection and/or replication of a target virus in a cell, comprising: contacting the cell with the composition, wherein, upon the contacting, the composition effects reduced infection and/or replication of the target virus in the cell. In some embodiments. In some embodiments, the guide nucleic acid targets the at least two different regions within a same gene of the target viral gene. In some embodiments, the guide nucleic acid targets the at least two different regions that are in two different genes of the target viral gene. In some embodiments, the guide nucleic acid targets viral gene selected from the group consisting of: B602L, DP86L, DP93R, KP86R, KP93L, M1249L, G1221R, O174L, and CP204L (p30). In some embodiments, the guide nucleic acid targets viral gene selected from the group consisting of: B602L, DP86L, DP93R, KP86R, KP93L, M1249L, G1221R, and O174L. In some embodiments, the guide nucleic acid comprises a sequence that is least 90% identical to a sequence fragment of SEQ ID NO: 6. In some embodiments, the guide nucleic acid comprises sequence that is at least 90% identical to a sequence fragment of SEQ ID NO: 7. In some embodiments, the guide nucleic acid is at least 90% identical to a sequence selected from SEQ ID NOS: 10001-13274, SEQ ID NOS: 20001-23274, and SEQ ID NOS: 30001-33274. In some embodiments, the guide nucleic acid is at least 90% identical to a sequence selected from SEQ ID NOS: 10001, 10002, 10433, 10548, 12318, and 12266. In some embodiments, the guide nucleic acid is at least 90% identical to a sequence selected from SEQ ID NOS: 20001, 20002, 20433, 20848, 22318, and 22266. In some embodiments, the guide nucleic acid is at least 90% identical to a sequence selected from SEQ ID NOS: 30001, 30002, 30433, 30848, 32318, and 32266. In some embodiments, the guide nucleic acid targets ASFV viral genes.

### BRIEF DESCRIPTION OF THE DRAWINGS

[0017] The novel features of the disclosure are set forth with particularity in the appended claims. A better understanding of the features and advantages of the present disclosure will be obtained by reference to the following detailed description that sets forth illustrative embodiments.

[0018] FIG. 1A illustrates reduced ASFV replication in cells isolated from a genetically modified pig compared to cells isolated from a wild type control pig.

[0019] FIG. 1B and FIG. 1C illustrate reduced ASFV copy number in supernatant (FIG. 1B) or cell pellet (FIG. 1C) from cell lysate derived from a genetically modified pig compared to supernatant or cell pellet from cell lysate derived from of a wild type control pig.

[0020] FIG. 2A illustrates genomic locus where homologous recombination is induced to introduce a knockin locus. FIG. 2A discloses the full-length sequences as SEQ ID NOS 33275-33279 and the highlighted regions of the “Warthog” and “QH-RELA” sequences as SEQ ID NOS 33298-33301, all respectively, in order of appearance.

[0021] FIG. 2B illustrates PCR products confirming the presence of the knockin allelic locus.

[0022] FIG. 2C illustrates Sanger sequencing results confirming that the live animals were born with the knockin locus. FIG. 2C discloses the left sequence alignment as SEQ ID NOS 33280-33284 and 33284, the middle sequence alignment as SEQ ID NOS 33286-33291 and the right sequence alignment as SEQ ID NOS 33292-33297, all respectively, top to bottom.

[0023] FIG. 3A illustrates multiple regions of a viral genome being targeted by multiplexing of gRNA.

[0024] FIG. 3B illustrates in vitro digestion of the PCR products by gRNA complexed with CRISPR/Cas9.

[0025] FIG. 3C illustrates inhibition of ASFV in edited COS-7 cells with stable anti-ASFV CRISPR/Cas9 expression as determined from purified ASFV single clone, which was further adapted on COS-7 cells to perform the in vitro infection assay.

[0026] FIG. 3D illustrates relative viral titers of replications between samples and between qPCR replicates as determined from purified ASFV single clone, which was further adapted on COS-7 cells to perform the in vitro infection assay.

[0027] FIG. 3E and FIG. 3F illustrate inhibition of ASFV amplification by multiplexing gRNAs to target and cleave multiple regions of ASFV viral genome.

[0028] FIG. 4A-FIG. 4C illustrates exemplary vectors or constructs for multiplexing expressions of the gRNAs and/or nuclease described herein. FIG. 4A illustrates exemplary multiplexing self-cleaving ribozymes to link the different gRNA sequences together to express multiple gRNA sequences under a single promoter. Dash lines indicate sites of self-cleavage.

[0029] FIG. 4B illustrates exemplary vector designs for expressing multiple gRNAs and nucleic acid-guided nuclease (e.g. Cas9). The nucleic acid-guided nuclease in these vectors can be fused to a nuclear localization sequence (NLS). In some cases, the nucleic acid-guided nuclease is without the NLS (e.g. pBv2-EF and pBv2-U6 vectors). FIG. 4C illustrates designs for the vectors and gRNA ribozyme described herein.

[0030] FIG. 5A illustrates the presence of the fragment of the Cas9 transgene construct (pBv1-U6) inserted at genomic DNA level in the cloned transgenic pigs. 100 ng of genomic DNA obtained from transgenic pigs P07, P09, P10, P11, and P13 all showed the amplification of the fragment of the transgene. WT: wild type large white pig genomic DNA. PC: positive control (plasmid carrying transgene).

[0031] FIG. 5B illustrates expression of Cas9 transgene by RT-qPCR. Pig fibroblasts were harvested from cloned transgenic pigs, and RNA was isolated from the fibroblasts. Reverse transcription was carried out to obtain cDNA. PCR were performed using cDNA as template to identify proper expression of Cas9 transgene. 100 ng cDNA from transgenic pig fibroblast (P10 and P12) or from wild type pig fibroblast. Cas9 expression was detected by qPCR of cDNA from transgenic pig fibroblasts.

[0032] FIG. 5C illustrates Cas9/sgRNA expression in the transgenic pig fibroblasts with active cutting ability using reporter plasmid detecting homology-directed repair (HDR). Reporter plasmid was used for reporting cutting of an ASFV sgRNA target site and generating a positive signal of EGFP (FITC channel) through homology-directed repair to reconstitute a functional EGFP copy. The use of the report plasmid can mimic the process of how ASFV can be cut after entering the cells of the transgenic pigs, confirming Cas9/sgRNA function of cutting dsDNA with ASFV sgRNA target site in the transgenic pig fibroblasts. HDR-reporter plasmid were transfected into fibroblasts of transgenic pigs P09 and P10. FACS were performed 48 hours after transfection to detect the expression of EGFP. Cas9/sgRNA proper cutting ability was detected in both P09 and P10 pig fibroblasts.

### DETAILED DESCRIPTION

[0033] While preferred embodiments of the present disclosure have been shown and described herein, it will be obvious to those skilled in the art that such embodiments are provided by way of example only. Numerous variations, changes, and substitutions will now occur to those skilled in the art without departing from the disclosure. It should be understood that various alternatives to the embodiments of the disclosure described herein may be employed in practicing the disclosure. It is intended that the following claims define the scope of the disclosure and that methods and structures within the scope of these claims and their equivalents be covered thereby.

[0034] Use of absolute or sequential terms, for example, “will,” “will not,” “shall,” “shall not,” “must,” “must not,” “first,” “initially,” “next,” “subsequently,” “before,” “after,” “lastly,” and “finally,” are not meant to limit scope of the present embodiments disclosed herein but as exemplary.

[0035] As used herein, the singular forms “a”, “an” and “the” are intended to include the plural forms as well, unless the context clearly indicates otherwise. Furthermore, to the extent that the terms “including”, “includes”, “having”, “has”, “with”, or variants thereof are used in either the detailed description and/or the claims, such terms are intended to be inclusive in a manner similar to the term “comprising.”

[0036] As used herein, the phrases “at least one”, “one or more”, and “and/or” are open-ended expressions that are both conjunctive and disjunctive in operation. For example, each of the expressions “at least one of A, B and C”, “at least one of A, B, or C”, “one or more of A, B, and C”, “one or more of A, B, or C” and “A, B, and/or C” means A alone, B alone, C alone, A and B together, A and C together, B and C together, or A, B and C together.

[0037] Any systems, methods, and platforms described herein are modular and not limited to sequential steps. Accordingly, terms such as “first” and “second” do not necessarily imply priority, order of importance, or order of acts.

[0038] The term “about” or “approximately” means within an acceptable error range for the particular value as determined by one of ordinary skill in the art, which will depend in part on how the value is measured or determined, e.g., the limitations of the measurement system. For example, “about” can mean within 1 or more than 1 standard deviation, per the practice in the given value. Where particular values are described in the application and claims, unless otherwise stated the term “about” should be assumed to mean an acceptable error range for the particular value.

[0039] The terms “increased”, “increasing”, or “increase” are used herein to generally mean an increase by a statically significant amount. In some embodiments, the terms “increased,” or “increase,” mean an increase of at least 10% as compared to a reference level, for example an increase of at least about 10%, at least about 20%, or at least about 30%, or at least about 40%, or at least about 50%, or at least about 60%, or at least about 70%, or at least about 80%, or at least about 90% or up to and including a 100% increase or any increase between 10-100% as compared to a reference level, standard, or control. Other examples of “increase” include an increase of at least 2-fold, at least 5-fold, at least 10-fold, at least 20-fold, at least 50-fold, at least 100-fold, at least 1000-fold or more as compared to a reference level.

[0040] The terms, “decreased”, “decreasing”, or “decrease” are used herein generally to mean a decrease by a statistically significant amount. In some embodiments, “decreased” or “decrease” means a reduction by at least 10% as compared to a reference level, for example a decrease by at least about 20%, or at least about 30%, or at least about 40%, or at least about 50%, or at least about 60%, or at least about 70%, or at least about 80%, or at least about 90% or up to and including a 100% decrease (e.g., absent level or non-detectable level as compared to a reference level), or any decrease between 10-100% as compared to a reference level. In the context of a marker or symptom, by these terms is meant a statistically significant decrease in such level. The decrease can be, for example, at least 10%, at least 20%, at least 30%, at least 40% or more, and is preferably down to a level accepted as within the range of normal for an individual without a given disease.

[0041] The terms “patient” or “subject” are used interchangeably herein, and encompass mammals. Non-limiting examples of mammal include, any member of the mammalian class: humans, non-human primates such as chimpanzees, and other apes and monkey species; farm animals such as cattle, horses, sheep, goats, swine; domestic animals such as rabbits, dogs, and cats; laboratory animals including rodents, such as rats, mice and guinea pigs, and the like.

[0042] As used herein, a “cell” generally refers to a biological cell. A cell is generally the basic structural, functional and/or biological unit of a living organism. A cell can originate from any organism having one or more cells. Some non-limiting examples include: a prokaryotic cell, eukaryotic cell, a bacterial cell, an archaeal cell, a cell of a single-cell eukaryotic organism, a protozoa cell, a cell from a plant (e.g. cells from plant crops, fruits, vegetables, grains, soy bean, corn, maize, wheat, seeds, tomatoes, rice, cassava, sugarcane, pumpkin, hay, potatoes, cotton, cannabis, tobacco, flowering plants, conifers, gymnosperms, ferns, clubmosses, hornworts, liverworts, mosses), an algal cell, (e.g., Botryococcus braunii, Chlamydomonas reinhardtii, Nannochloropsis gaditana, Chlorella pyrenoidosa, Sargassum patens C. Agardh, and the like), seaweeds (e.g. kelp), a fungal cell (e.g., a yeast cell, a cell from a mushroom), an animal cell, a cell from an invertebrate animal (e.g. fruit fly, cnidarian, echinoderm, nematode, etc.), a cell from a vertebrate animal (e.g., fish, amphibian, reptile, bird, mammal), a cell from a mammal (e.g., a pig, a cow, a goat, a sheep, a rodent, a rat, a mouse, a non-human primate, a human, etc.), and etcetera. Sometimes a cell is not originating from a natural organism (e.g. a cell can be a synthetically made, sometimes termed an artificial cell). A cell can be derived from a cell line. In some embodiments, a cell is a porcine cell. Non-limiting examples of the breeds a porcine cell originates from or is derived from includes any of the following pig breeds: Landrace, American Landrace, American Yorkshire, Aksai Black Pied, Angeln saddleback, Appalachian English, Arapawa Island, Auckland Island, Australian Yorkshire, Babi Kampung, Ba Xuyen, Bantu, Basque, Bazna, Beijing Black, Belarus Black Pied, Belgian Landrace, Bengali Brown Shannaj, Bentheim Black Pied, Berkshire, Bisaro, Bangur, Black Slavonian, Black Canarian, Breitovo, British Landrace, British Lop, British Saddleback, Bulgarian White, Cambrough, Cantonese, Celtic, Chato Murciano, Chester White, Chiangmai Blackpig, Choctaw Hog, Creole, Czech Improved White, Danish Landrace, Danish Protest, Dermantsi Pied, Li Yan, Duroc, Dutch Landrace, East Landrace, East Balkan, Essex, Estonian Bacon, Fengjing, Finnish Landrace, Forest Mountain, French Landrace, Gascon, German Landrace, Gloucestershire Old Spots, Gottingen minipig, Grice, Guinea Hog, Hampshire, Hante, Hereford, Hezuo, Hogan Hog, Huntington Black Hog, Iberian, Italian Landrace, Japanese Landrace, Jeju Black, Jinhua, Kakhetian, Kele, Kemerovo, Korean Native, Krskopolje, Kunekune, Lamcombe, Large Black, Large Black-White, Large White, Latvian White, Leicoma, Lithuanian Native, Lithuanian White, Lincolnshire Curly-Coated, Livny, Malhado de Alcobaca, Mangalitsa, Meishan, Middle White, Minzhu, Minokawa Buta, Mong Cai, Mora Romagnola, Moura, Mukota, Mulefoot, Murom, Myrhorod, Nero dei Nebrodi, Neijiang, New Zealand, Ningxiang, North Caucasian, North Siberian, Norwegian Landrace, Norwegian Yorkshire, Ossabaw Island, Oxford Sandy and Black, Pakchong 5, Philippine Native, Pietrain, Poland China, Red Wattle, Saddleback, Semirechensk, Siberian Black Pied, Small Black, Small White, Spots, Surabaya Babi, Swabian-Hall, Swedish Landrace, Swallow Belied Mangalitza, Taihu pig, Tamworth, Thuoc Nhieu, Tibetan, Tokyo-X, Tsivilsk, Turopolje, Ukrainian Spotted Steppe, Spotted, Ukrainian White Steppe, Urzhum, Vietnamese Potbelly, Welsh, Wessex Saddleback, West French White, Windsnyer, Wuzhishanm, Yanan, Yorkshire, and Yorkshire Blue and White.

[0043] The terms “pig”, “swine”, and “porcine” are used herein interchangeably to refer to anything related to the various breeds of domestic pig, species Sus scrofa. The pigs comprises the porcine cells of any of the porcine breeds described herein.

[0044] The term “nucleotide,” as used herein, generally refers to a base-sugar-phosphate combination. A nucleotide can be a synthetic nucleotide. A nucleotide can be a synthetic nucleotide analog. Nucleotides can be monomeric units of a nucleic acid sequence (e.g. deoxyribonucleic acid (DNA) and ribonucleic acid (RNA)). The term nucleotide can include ribonucleoside triphosphates adenosine triphosphate (ATP), uridine triphosphate (UTP), cytosine triphosphate (CTP), guanosine triphosphate (GTP) and deoxyribonucleoside triphosphates such as dATP, dCTP, dITP, dUTP, dGTP, dTTP, or derivatives thereof. Such derivatives can include, for example, [αS]dATP, 7-deaza-dGTP and 7-deaza-dATP, and nucleotide derivatives that confer nuclease resistance on the nucleic acid molecule containing them. The term nucleotide as used herein can refer to dideoxyribonucleoside triphosphates (ddNTPs) and their derivatives. Illustrative examples of dideoxyribonucleoside triphosphates can include, but are not limited to, ddATP, ddCTP, ddGTP, ddITP, and ddTTP.

[0045] The terms “polynucleotide,” “oligonucleotide,” and “nucleic acid” are used interchangeably to refer to a polymeric form of nucleotides of any length, either deoxyribonucleotides or ribonucleotides, or analogs thereof, either in single-, double-, or multi-stranded form. A polynucleotide can be exogenous or endogenous to a cell, e.g. a heterologous polynucleotide. A polynucleotide can exist in a cell-free environment. A polynucleotide can be a gene or fragment thereof. A polynucleotide can be DNA. A polynucleotide can be RNA. A polynucleotide can have any three dimensional structure, and can perform any function, known or unknown. A polynucleotide can comprise one or more analogs (e.g. altered backbone, sugar, or nucleobase). If present, modifications to the nucleotide structure can be imparted before or after assembly of the polymer. Some non-limiting examples of analogs include: 5-bromouracil, peptide nucleic acid, xeno nucleic acid, morpholinos, locked nucleic acids, glycol nucleic acids, threose nucleic acids, dideoxynucleotides, cordycepin, 7-deaza-GTP, fluorophores (e.g. rhodamine or fluorescein linked to the sugar), thiol containing nucleotides, biotin linked nucleotides, fluorescent base analogs, CpG islands, methyl-7-guanosine, methylated nucleotides, inosine, thiouridine, pseudourdine, dihydrouridine, queuosine, and wyosine. Non-limiting examples of polynucleotides include coding or non-coding regions of a gene or gene fragment, loci (locus) defined from linkage analysis, exons, introns, messenger RNA (mRNA), transfer RNA (tRNA), ribosomal RNA (rRNA), short interfering RNA (siRNA), short-hairpin RNA (shRNA), micro-RNA (miRNA), ribozymes, cDNA, recombinant polynucleotides, branched polynucleotides, plasmids, vectors, isolated DNA of any sequence, isolated RNA of any sequence, cell-free polynucleotides including cell-free DNA (cfDNA) and cell-free RNA (cfRNA), nucleic acid probes, and primers. The sequence of nucleotides can be interrupted by non-nucleotide components.

[0046] The terms “transfection” or “transfected” generally refers to introduction of a nucleic acid construct into a cell by non-viral or viral-based methods. The nucleic acid molecules can be gene sequences encoding complete proteins or functional portions thereof. See, e.g., Sambrook et al., 1989, Molecular Cloning: A Laboratory Manual, 18.1-18.88. In some embodiments, the transfection methods is utilized for introducing nucleic acid construct into a cell for generating a genetically modified animal. Such techniques can include pronuclear microinjection (U.S. Pat. No. 4,873,191), retrovirus mediated gene transfer into germ lines (Van der Putten et al. (1985) Proc. Natl. Acad. Sci. USA 82, 6148-1652), gene targeting into embryonic stem cells (Thompson et al. (1989) Cell 56, 313-321), electroporation of embryos (Lo (1983) Mol. Cell. Biol. 3, 1803-1814), sperm mediated gene transfer (Lavitrano et al. (2002) Proc. Natl. Acad. Sci. USA 99, 14230-14235; Lavitrano et al. (2006) Reprod. Fert. Develop. 18, 19-23), and in vitro transformation of somatic cells, such as cumulus or mammary cells, or adult, fetal, or embryonic stem cells, followed by nuclear transplantation (Wilmut et al. (1997) Nature 385, 810-813; and Wakayama et al. (1998) Nature 394, 369-374).

[0047] The term “gene,” as used herein, refers to a segment of nucleic acid that encodes an individual protein or RNA (also referred to as a “coding sequence” or “coding region”), optionally together with associated regulatory region such as promoter, operator, terminator and the like, which can be located upstream or downstream of the coding sequence. The term “gene” is to be interpreted broadly, and can encompass mRNA, cDNA, cRNA and genomic DNA forms of a gene. In some uses, the term “gene” encompasses the transcribed sequences, including 5′ and 3′ untranslated regions (5′-UTR and 3′-UTR), exons and introns. In some genes, the transcribed region will contain “open reading frames” that encode polypeptides. In some uses of the term, a “gene” comprises only the coding sequences (e.g., an “open reading frame” or “coding region”) necessary for encoding a polypeptide. In some aspects, genes do not encode a polypeptide, for example, ribosomal RNA genes (rRNA) and transfer RNA (tRNA) genes. In some aspects, the term “gene” includes not only the transcribed sequences, but in addition, also includes non-transcribed regions including upstream and downstream regulatory regions, enhancers and promoters. The term “gene” can encompass mRNA, cDNA and genomic forms of a gene.

[0048] The term “mutation,” as used herein, can refer to a substitution of a residue within a sequence, e.g., a nucleic acid or amino acid sequence, with another residue, or a deletion or insertion of one or more residues within a sequence. One or more mutations can be described by identifying the original residue followed by the position of the residue within the sequence and by the identity of the newly substituted residue. Mutation can be a change or alteration in a sequence (e.g., nucleic acid sequence, genomic sequence, genetic sequence such as DNA, RNA, or protein sequence) relative to a reference sequence. The reference sequence can be a wild-type sequence, a sequence of a healthy or normal cell, or a sequence that is not associated with a disease or a disorder. A reference sequence can be a sequence not associated with a cancer. Non-limiting examples of mutations include point mutations, substitution of one or more nucleotides, deletion of one or more nucleotides, insertion of one or more nucleotides, fusion of one or more nucleotides, frame shift mutation, aberration, alternative splicing, abnormal methylation, missense mutation, conservative mutation, non-conservative mutation, nonsense mutation, splice variant, alternative splice variant, transition, transversion, de novo mutation, deleterious mutation, disease-causing mutation, epimutation, founder mutation, germline mutation, somatic mutation, predisposing mutation, splice-site mutation, or susceptibility gene mutation. The mutation can be a pathogenic variant or mutation that increases an individual's susceptibility or predisposition to a certain disease or disorder. The mutation can be a driver mutation (e.g., a mutation that can confer a fitness advantage to cells in their microenvironment, thereby driving the cell lineage to cancer). The driver mutation can be a lost function mutation. The mutation can be a lost function mutation. The mutation can be a passenger mutation (e.g., a mutation that occurs in a genome with the driver mutation and can be associated with clonal expansion). As used herein, the term “gene” can refer to a combination of polynucleotide elements, that when operatively linked in either a native or recombinant manner, provide some product or function. As used herein, a modified endogenous gene can refer to mutation of the endogenous gene.

[0049] The term “knockout” (“KO”) or “knocking out” is used herein to refer to a modified endogenous gene characterized by deletion, deactivation, or ablation of the endogenous gene in a pig or other non-human mammal or any cells in the pig or other non-human mammal. KO, as used herein, can also refer to a method of performing, or having performed, a deletion, deactivation, mutation or ablation of the endogenous gene or locus thereof. As used herein, a modified endogenous gene can refer to KO of the endogenous gene.

[0050] The term “knockin” (“KI”) or “knocking in” is used herein to refer to a modified an endogenous gene characterized by addition, replacement, or mutation of nucleotide(s) of a gene in a pig or other non-human mammal or any cells in the pig or other non-human mammal. KI, as used herein, can also refer to a method of performing, or having performed, an addition, replacement, or mutation of nucleotide(s) of the endogenous gene or locus thereof. As used herein, a modified endogenous gene can refer to KI of an endogenous gene. In some embodiments, the KI can be an endogenous gene. In some embodiments, the KI can be a heterologous gene. In some embodiments, the KI can be a knockin of a heterologous gene to replace the endogenous gene.

[0051] As used herein, the terms “polypeptide”, “peptide”, and “protein” can be used interchangeably herein in reference to a polymer of amino acid residues. A protein can refer to a full-length polypeptide as translated from a coding open reading frame, or as processed to its mature form, while a polypeptide or peptide can refer to a degradation fragment or a processing fragment of a protein that nonetheless uniquely or identifiably maps to a particular protein. A polypeptide can be a single linear polymer chain of amino acids bonded together by peptide bonds between the carboxyl and amino groups of adjacent amino acid residues. Polypeptides can be modified, for example, by the addition of carbohydrate, phosphorylation, etc. Proteins can comprise one or more polypeptides. A polypeptide can be a heterologous polypeptide.

[0052] As used herein, the terms “fragment” or equivalent terms can refer to a locus of a protein that has less than the full length of the protein and optionally maintains the function of the protein. Further, when the locus of the protein is blasted against the protein, the locus of the protein sequence can align, for example, at least with 80% identity to a part of the protein sequence.

[0053] The term “target polynucleotide”, “target viral genome”, or “target viral gene” as used herein can refer to a nucleic acid or polynucleotide which is targeted by the heterologous RNA polynucleotide and the gene regulating moiety of the present disclosure. A target polynucleotide can be DNA (e.g., endogenous or exogenous), for example, a DNA that can serve as a template to generate mRNA transcripts and/or the various regulatory regions which regulate transcription of an mRNA from a DNA template. A target polynucleotide can be a locus of a larger polynucleotide, for example a chromosome or a region of a chromosome. A target polynucleotide can be RNA. RNA can be, for example, mRNA which can serve as template encoding for a protein. A target polynucleotide comprising RNA can include or be within the various regulatory regions which regulate translation of protein from an mRNA template. A target polynucleotide can encode for a gene product (e.g., DNA encoding for an RNA transcript or RNA encoding for a protein product) or comprise a regulatory sequence which regulates expression of a gene product. Target polynucleotide can refer to a nucleic acid sequence on a single strand of a target nucleic acid. The target polynucleotide can be a locus of a gene, a regulatory sequence, genomic DNA, cell free nucleic acid including cfDNA and/or cfRNA, cDNA, a fusion gene, and RNA including mRNA, miRNA, rRNA, and others. A target polynucleotide, when targeted by a gene regulating moiety, can result in altered gene expression (e.g., increased transcription or translation of a mutated gene) and/or activity. A target polynucleotide can comprise a nucleic acid sequence that cannot be related to any other sequence in a nucleic acid sample by a single nucleotide substitution. A target polynucleotide can comprise or can be a locus of a gene sequence or a regulatory element thereof. A target polynucleotide can comprise or can be a locus of an exon sequence, an intron sequence, an exon-intron junction, splice acceptor-splice donor site, a start codon sequence, a stop codon sequence, a promoter site, an alternative promoter site, 5′ regulatory element, enhancer, 5′ UTR region, 3′ UTR region, poly adenylation site, or binding site of a polymerase, nuclease, gyrase, topoisomerase, methylase or methyl transferase, transcription factors, enhancer, or zinc finger. A target polynucleotide can comprise or be a locus of a splice variant or an alternative splice variant. A target polynucleotide can be present only in a cell to be targeted (e.g., a cancer cell, a diseased cell, cell infected with a microbe such as a virus or bacteria) and can be absent from normal or healthy cells. A target polynucleotide can comprise or be a locus of a microorganism or a microbe, such as a virus or a bacteria. A target polynucleotide can comprise or be a locus of a variant polynucleotide, for example, splice-site variant, point variant, pathogenic variant, unclassified variant, copy number variant, de novo variant, epigenetic variant, founder variant, frameshift variant, germline variant, somatic variant, missense variant, nonsense variant, or a pathogenic variant. A target polynucleotide can comprise or be a locus of an alternative splice variant resulting from a driver mutation.

[0054] The terms “complement,” “complements,” “complementary,” and “complementarity,” as used herein, generally refer to a sequence that is fully complementary to and hybridizable to the given sequence. In some cases, a sequence hybridized with a given nucleic acid is referred to as the “complement” or “reverse-complement” of the given molecule if its sequence of bases over a given region is capable of complementarily binding those of its binding partner, such that, for example, A-T, A-U, G-C, and G-U base pairs are formed. In general, a first sequence that is hybridizable to a second sequence is specifically or selectively hybridizable to the second sequence, such that hybridization to the second sequence or set of second sequences is preferred (e.g. thermodynamically more stable under a given set of conditions, such as stringent conditions) to hybridization with non-target sequences during a hybridization reaction. Typically, hybridizable sequences share a degree of sequence complementarity over all or a locus of their respective lengths, such as between 25%-100% complementarity, including at least 25%, 30%, 35%, 40%, 45%, 50%, 55%, 60%, 65%, 70%, 75%, 80%, 85%, 90%, 91%, 92%, 93%, 94%, 95%, 96%, 97%, 98%, 99%, and 100% sequence complementarity. Sequence identity, such as for the purpose of assessing percent complementarity, can be measured by any suitable alignment algorithm, including but not limited to the Needleman-Wunsch algorithm (see e.g. the EMBOSS Needle aligner available at www.ebi.ac.uk/Tools/psa/emboss_needle/nucleotide.html, optionally with default settings), the BLAST algorithm (see e.g. the BLAST alignment tool available at blast.ncbi.nlm.nih.gov/Blast.cgi, optionally with default settings), or the Smith-Waterman algorithm (see e.g. the EMBOSS Water aligner available at www.ebi.ac.uk/Tools/psa/emboss_water/nucleotide.html, optionally with default settings). Optimal alignment can be assessed using any suitable parameters of a chosen algorithm, including default parameters.

[0055] The term “percent (%) identity”, as used herein, generally refers to the percentage of amino acid (or nucleic acid) residues of a candidate sequence that are identical to the amino acid (or nucleic acid) residues of a reference sequence after aligning the sequences and introducing gaps, if necessary, to achieve the maximum percent identity (i.e., gaps can be introduced in one or both of the candidate and reference sequences for optimal alignment and non-homologous sequences can be disregarded for comparison purposes). Alignment, for purposes of determining percent identity, can be achieved in various ways that are within the skill in the art, for instance, using publicly available computer software such as BLAST, ALIGN, or Megalign (DNASTAR) software. Percent identity of two sequences can be calculated by aligning a test sequence with a comparison sequence using BLAST, determining the number of amino acids or nucleotides in the aligned test sequence that are identical to amino acids or nucleotides in the same position of the comparison sequence, and dividing the number of identical amino acids or nucleotides by the number of amino acids or nucleotides in the comparison sequence.

[0056] The term “mismatch” generally refers to lack of complementarity between two nucleotides when aligned. Complementary bases in DNA are A-T and G-C. Complementary bases in RNA are A-U and G-C. Thus a mismatch occurs when two oligonucleotide sequences are aligned and at one or more nucleotide positions that an A is not paired with T or a G is not paired with C in DNA or an A is not paired with U or a G is not paired with C in RNA.

[0057] As used herein, the term “in vivo” can be used to describe an event that takes place in a subject's body.

[0058] As used herein, the term “ex vivo” can be used to describe an event that takes place outside of a subject's body. An “ex vivo” assay cannot be performed on a subject. Rather, it can be performed upon a sample separate from a subject. Ex vivo can be used to describe an event occurring in an intact cell outside a subject's body.

[0059] As used herein, the term “in vitro” can be used to describe an event that takes places contained in a container for holding laboratory reagent such that it is separated from the living biological source organism from which the material is obtained. In vitro assays can encompass cell-based assays in which cells alive or dead are employed. In vitro assays can also encompass a cell-free assay in which no intact cells are employed.

[0060] “Treating” or “treatment” can refer to both therapeutic treatment and prophylactic or preventative measures, wherein the object is to prevent or slow down (lessen) a targeted pathologic condition or disorder. Those in need of treatment include those already with the disorder, as well as those prone to have the disorder, or those in whom the disorder is to be prevented. A therapeutic benefit can refer to eradication or amelioration of symptoms or of an underlying disorder being treated. Also, a therapeutic benefit can be achieved with the eradication or amelioration of one or more of the physiological symptoms associated with the underlying disorder such that an improvement is observed in the subject, notwithstanding that the subject can still be afflicted with the underlying disorder. A prophylactic effect can include delaying, preventing, or eliminating the appearance of a disease or condition, delaying or eliminating the onset of symptoms of a disease or condition, slowing, halting, or reversing the progression of a disease or condition, or any combination thereof. For prophylactic benefit, a subject at risk of developing a particular disease, or to a subject reporting one or more of the physiological symptoms of a disease can undergo treatment, even though a diagnosis of this disease cannot have been made.

[0061] The term “effective amount” and “therapeutically effective amount,” as used interchangeably herein, generally refer to the quantity of a composition, for example a composition comprising immune cells such as lymphocytes (e.g., T lymphocytes and/or NK cells) comprising a system of the present disclosure, that is sufficient to result in a desired activity upon administration to a subject in need thereof. Within the context of the present disclosure, the term “therapeutically effective” refers to that quantity of a composition that is sufficient to delay the manifestation, arrest the progression, relieve or alleviate at least one symptom of a disorder treated by the methods of the present disclosure.

[0062] The term “pharmaceutically acceptable carrier,” “pharmaceutically acceptable excipient,” “physiologically acceptable carrier,” or “physiologically acceptable excipient” refers to a pharmaceutically-acceptable material, composition, or vehicle, such as a liquid or solid filler, diluent, excipient, solvent, or encapsulating material. A component can be “pharmaceutically acceptable” in the sense of being compatible with the other ingredients of a pharmaceutical formulation. It can also be suitable for use in contact with the tissue or organ of humans and non-human mammals without excessive toxicity, irritation, allergic response, immunogenicity, or other problems or complications, commensurate with a reasonable benefit/risk ratio. See, Remington: The Science and Practice of Pharmacy, 21st Edition; Lippincott Williams & Wilkins: Philadelphia, P A, 2005; Handbook of Pharmaceutical Excipients, 5th Edition”; Rowe et al., Eds., The Pharmaceutical Press and the American Pharmaceutical Association: 2005; and Handbook of Pharmaceutical Additives, 3rd Edition; Ash and Ash Eds., Gower Publishing Company: 2007; Pharmaceutical Preformulation and Formulation, Gibson Ed., CRC Press LLC: Boca Raton, F L, 2004).

[0063] The term “pharmaceutical composition” refers to a mixture of a compound disclosed herein with other chemical components, such as diluents or carriers. The pharmaceutical composition can facilitate administration of the compound to an organism. Multiple techniques of administering a compound exist in the art including, but not limited to, oral, injection, aerosol, parenteral, and topical administration.

### Overview

[0064] Preventing or treating viral infections remain an ongoing challenge in agriculture. As such, there remains a need to generate a genetically modified cell or genetically modified non-human mammal that exhibits enhanced resistant to viral infections caused by multiple strains of virus. There also remains a need for compositions that can prevent or treat viral infection caused by multiple strains of virus in cells or non-human mammals.

[0065] Accordingly, described herein are genetically modified cells or genetically modified non-human mammals comprising one or more genetically modified endogenous genes. The genetically modified genes can increase the cell's or non-human mammal's resistance to or ability to transmit viral infections. Such cells or non-human mammals with reduced susceptibility to viral infections can be useful in agriculture or as sources of transplantable tissues or organs, for example. Endogenous genes can comprise genes encoding receptor, genes encoding peptidase, genes encoding, hydroxylase, genes encoding glycotransferase, or genes encoding interferon-stimulated-gene (ISG) protein. Also described herein are compositions comprising at least one heterologous polypeptide and/or at least one polynucleotide for targeting and cleaving viral genomes, viral genes, or transcripts of viral genomes or viral genes of one or more strains of viruses.

### Genetically Modified Endogenous Gene

[0066] Described herein, in some embodiments, is a genetically modified cell exhibiting enhanced resistance to viral infection as compared to a control cell, such as an unmodified cell. In some embodiments, the genetically modified cell comprises one or more modified endogenous genes. In some embodiments, the one or more modified endogenous genes comprise modified chromosomal sequence encoding the one or more endogenous genes. In some embodiments, the genetically modified cell is used to generate a genetically modified tissue, organ, or non-human mammal. In some embodiments, the genetically modified cell, tissue, organ, or non-human mammal comprises at least one, two, three, four, five, six, seven, eight, nine, 10, 15, 20, 30, or more modified endogenous genes. In some embodiments, the one or more endogenous genes of the cell, tissue, organ, or non-human mammal is genetically modified by point mutation, insertion, deletion, frameshift, translocation, duplication, inversion, non-homologous end joining (NHEJ), homology directed repair (HDR), inactivation, disruption, excision of a portion, or a combination thereof.

[0067] In some embodiments, the at least one modified endogenous genes prevents or decreases binding and entering of the virus into the genetically modified cell. In some embodiments, the at least one modified endogenous gene modulates immunes response induced by the infection of the virus. In some embodiments, the modified endogenous gene is a knockout (KO) of the endogenous gene. In some embodiments, the modified endogenous gene is a knockin (KI) of the endogenous gene. In some embodiments, at least one of the modified endogenous genes encodes a receptor protein. In some embodiments, the receptor protein is a scavenger receptor protein. Exemplary scavenger receptor protein can include scavenger receptor type 1 (SR-A1), scavenger receptor class A, scavenger class B, mucin, Lectin-like oxidized LDL receptor-1 (LOX-1), CD36, CD68, and CD163. In some cases, the scavenger receptor protein can comprise one or more members (e.g., at least 1, 2, 3, 4, 5, or more members) selected from the group consisting of SR-A1, scavenger receptor class A, scavenger class B, mucin, LOX-1, CD36, CD68, and CD163.

[0068] In some embodiments, the modified endogenous gene is CD163. In some embodiments, the genetically modified cell, tissue, organ, or non-human mammal comprises at least one modified chromosomal sequence in the endogenous gene encoding CD163. In some embodiments, the modification of CD163 is any one of the domains of CD163. In some cases, the modification of CD163 is in one or more domains (e.g., at least 1, 2, 3, 4, 5, or more domains) selected from the group consisting of SRCR1, SRCR2, SRCR3, SRCR4, SRCR8, and SRCR9. In some embodiments, the modification of CD163 is in one or more regions (e.g., at least 1, 2, 3, 4, 5, or more regions) selected from the group consisting of exon 1, exon 2, exon 3, exon 4, exon 5, exon 6, exon 7, exon 8, exon 9, exon 10, exon 11, exon 12, exon 13, exon 14, exon 15, exon 16, exon 17, intron 1, intron 2, intron 3, intron 4, intron 5, intron, 6, intron, 7, intron 8, intron 9, intron 10, intron 11, intron 12, intron 13, intron 14, intron 15, and intron 16. In some cases, the modification of CD163 is in one or more regions (e.g., at least 1, 2, 3, 4, 5, or more regions) selected from the group consisting of exon 1, exon 2, exon 3, exon 4, exon 5, exon 6, exon 10, exon 11, exon 12, exon 13, exon 14, exon 15, exon 16, exon 17, intron 1, intron 2, intron 3, intron 4, intron 5, intron 9, intron 10, intron 11, intron 12, intron 13, intron 14, intron 15, and intron 16. In some embodiments, the modified chromosomal sequence of CD163 is in one or more regions (e.g., 1, 2, or 3 regions) selected from the group consisting of exon 4, intron 3, and intron 4.

[0069] In some cases, the modification of CD163 can comprise a plurality of modifications within the same domain (e.g., SRCR1, SRCR2, SRCR3, SRCR4, SRCR8, or SRCR9) or within the same region (e.g., exon 1, exon 2, exon 3, exon 4, exon 5, exon 6, exon 7, exon 8, exon 9, exon 10, exon 11, exon 12, exon 13, exon 14, exon 15, exon 16, exon 17, intron 1, intron 2, intron 3, intron 4, intron 5, intron, 6, intron, 7, intron 8, intron 9, intron 10, intron 11, intron 12, intron 13, intron 14, intron 15, or intron 16). Alternatively or in addition to, the modification of CD163 can comprise a plurality of modifications that are in different domains or different regions.

[0070] In some embodiments, the modified chromosomal sequence of CD163 comprises a frameshift mutation. In some embodiments, the modified chromosomal sequence of CD163 comprises a frameshift mutation introduced in exon 4. In some embodiments, the modification of CD163 comprises a reduced expression or biological activity associated with the modified CD163. In some embodiments, the modification of CD163 is a CD163 knockout. In some embodiments, the modification of CD163 comprises cleaving transcript of CD163 or inhibiting expression of CD163. In some embodiments, the genetically modified cell, tissue, organ, or non-human mammal comprising the modified CD163 exhibits enhanced resistance to viral infection as compared to a control cell, tissue, organ, or non-human mammal. In some embodiments, the genetically modified cell, tissue, organ, or non-human mammal comprising the modified CD163 exhibits enhanced resistance to PRRSV infection and ASFV infection. In some embodiments, the genetically modified cell, tissue, organ, or non-human mammal comprising the modified CD163 exhibits enhanced resistance to PRRSV infection. In some embodiments, the genetically modified cell, tissue, organ, or non-human mammal comprising the modified CD163 exhibits enhanced resistance to ASFV infection.

[0071] In some embodiments, at least one of the modified endogenous genes encodes a peptidase. In some cases, the peptidase is a member of the peptidase family M1 such as aminopeptidase N (ANPEP), aminopeptidase A, leukotriene A4 hydrolase, Ape2 aminopeptidase, Aap1′ aminopeptidase, pyroglutamyl-peptidase II, cytosol alanyl aminopeptidase, cystinyl aminopeptidase, aminopeptidase G, aminopeptidase B, aminopeptidase Ey, endoplasmic reticulum aminopeptidase 1, tricorn interacting factor F2, tricorn interacting factor F3, arginyl aminopeptidase-like 1, ERAP2 aminopeptidase, aminopeptidase, aminopeptidase 0, or Tata binding protein associated factor. In some embodiments, the one or more modified endogenous gene is a gene encoding ANPEP. In some cases, the modification is in any one of the exons of the ANPEP gene. In some cases, the modification comprises modifying exon 1 of the ANPEP gene. In some embodiments, the modified ANPEP comprises reduced expression or biological activity associated with the modified ANPEP. In some embodiments, the modified ANPEP is a ANPEP knockout. In some embodiments, the modification of ANPEP comprises cleaving transcript of ANPEP or inhibiting expression of ANPEP. In some embodiments, the genetically modified cell, tissue, organ, or non-human mammal comprising the modified ANPEP exhibits enhanced resistance to viral infection as compared to a control cell, tissue, organ, or non-human mammal. In some embodiments, the genetically modified cell, tissue, organ, or non-human mammal comprising the modified ANPEP exhibits enhanced resistance to TGEV infection.

[0072] In some embodiments, at least one of the modified endogenous genes encodes hydroxylase. In some cases, the hydroxylase is a steroid hydroxylase. In some embodiments, the hydroxylase is a prolyl hydroxylase. In some instances, the hydroxylase is a nucleotide hydroxylase such as purine or pyrimidine nucleotide hydroxylase. In some embodiments, the hydroxylase is Cytidine monophospho-N-acetylneuraminic acid hydroxylase (CMAH). In some instances, the modified CMAH comprises reduced expression or biological activity associated with the modified CMAH. In some embodiments, the modified CMAH is a CMAH knockout. In some embodiments, the modification of CMAH comprises cleaving transcript of CMAH or inhibiting expression of CMAH.

[0073] In some embodiments, at least one of the modified endogenous genes encodes glycotransferase. In some embodiments, the glycotransferase is a galactotransferase. In some instances, the galactotransferase is any one of the following: B3GALNT1; B3GALNT2; B3GALT1; B3GALT2; B3GALT4; B3GALT5; B3GALT6; B3GNT2; B3GNT3; B3GNT4; B3GNT5; B3GNT6; B3GNT7; B3GNT8; B4GALNT1; B4GALNT2; B4GALNT3; B4GALNT4; B4GALT1; B4GALT2; B4GALT3; B4GALT4; B4GALT5; B4GALT6; B4GALT7; GGTA1; GALNT1; GALNT2; GALNT3; GALNT4; GALNT5; GALNT6; GALNT7; GALNT8; GALNT9; GALNT10; GALNT11; GALNT12; GALNT13; GALNT14; GALNTL1; GALNTL2; GALNTL4; GALNTL5; and GALNTL6. In some embodiments, the one or more modified endogenous genes is a gene encoding B4GALNT2. In some embodiments, the modified B4GALNT2 comprises reduced expression or biological activity associated with the modified B4GALNT2. In some embodiments, the modified B4GALNT2 is a B4GALNT2 knockout. In some embodiments, the modification of B4GALNT2 comprises cleaving transcript of B4GALNT2 or inhibiting expression of B4GALNT2. In some embodiments, the one or more modified endogenous genes is a gene encoding GGTA1. In some cases, the modified GGTA1 comprises reduced expression or biological activity associated with the modified GGTA1. In some embodiments, the modified GGTA1 is a GGTA1 knockout. In some embodiments, the modification of GGTA1 is cleaving transcript of GGTA1 or inhibiting expression of GGTA1.

[0074] In some embodiments, the genetically modified cell, tissue, organ, or non-human mammal comprising the modified CMAH, the modified B4GALNT2, and the modified GGTA1 exhibits enhanced resistance to viral infection as compared to a control cell, tissue, organ, or non-human mammal. In some embodiments, the genetically modified cell, tissue, organ, or non-human mammal comprising the modified CMAH, the modified B4GALNT2, and the modified GGTA1 exhibits enhanced resistance to ASFV infection.

[0075] In some embodiments, the one or more modified endogenous genes encodes interferon-stimulated-gene (ISG) protein. Such ISG protein is induced by any one of the Type I, II, or II interferon signaling cascade as mediated by the JAK-STAT pathway. In some embodiments, the ISG is retinoic acid-inducible gene 1 (RIG-I)-like receptors (RLRs), AIM2-like receptors (ALRs), nucleotide-binding oligomerization domain-like receptors (NLRs), Toll-like receptors (TLRs) 1, 2, 3, 4, 7, and 9, oligoadenylate synthetase (OAS), latent endoribonuclease (RNaseL), protein kinase R (PKR), cyclic GMP-AMP (cGAMP) synthase (cGAS), stimulator of IFN genes (STING), mitochondrial antiviral-signaling protein (MAVS, also known as VISA, IPS-1, or Cardif), SOCS proteins, USP18, NF-κB proteins such as RELA, myxovirus resistance (Mx), cholesterol-25-hydroxylase (CH25H), IFITM proteins., TRIM proteins, zinc-finger antiviral protein (ZAP), the IFN-induced protein with tetratricopeptide repeats (IFIT) family, ISG15, UBE2L6, HERC5, HERC6, UBE1LA, Viperin, Tetherin, ADAR, APOBEC3, C6orf150 (MB21D1), CD74, DDIT4, DDX58 (RIG-I), DDX60, GBP1, GBP2, HPSE, IRF1, IRF7, ISG20, MAP3K14 (NIK), MOV10, MS4A4A, NAMPT (PBEF1), NT5C3, P2RY6, PHF15, RTP4, SLC15A3, SLC25A28, SSBP3, TREX1, SUN2 (UNC84B), or ZC3HAV1 (ZAP). In some embodiments, the modified ISG protein is RELA. In some embodiments, the one or more modified endogenous genes is a gene encoding RELA.

[0076] In some cases, the modified RELA comprises reduced expression or biological activity associated with the modified RELA. In some cases, the modified RELA comprises unchanged expression or biological activity associated with the modified RELA. In some embodiments, the modified RELA is a knockout of RELA. In some embodiments, the modification of the RELA comprises cleaving transcript of RELA or inhibiting expression of RELA. In some embodiments, the modified RELA is a RELA knockin. In some embodiments, the endogenous RELA comprises a nucleic acid sequence of SEQ ID NO: 1 (Table 1). In some embodiments, the RELA comprises a variant of SEQ ID NO: 1 comprising one, two, three, four, five, six, seven, eight, nine, 10 or more nucleic acid substitutions, additions, or deletions. In some embodiments, the RELA knockin comprises a nucleic acid sequence that is at least about 60%, 70%, 80%, 90%, 95%, or 99% identical to SEQ ID NO: 1. In some embodiments, the RELA knockin comprises nucleic acid substitution A1342G in SEQ ID NO: 1. In some embodiments, the RELA knockin comprises nucleic acid substitution T1453C in SEQ ID NO: 1. In some embodiments, the RELA knockin comprises nucleic acid substitution T1591 in SEQ ID NO: 1. In some embodiments, the RELA knockin comprises nucleic acid substitutions: A1342G, T1453C, and/or T1591 in SEQ ID NO: 1.

[0077] In some embodiments, the endogenous RELA comprise an amino acid sequence of SEQ ID NO: 2 (Table 1). In some embodiments, the RELA knockin comprises genetically modifying SEQ ID NO: 2 to introduce at least one, two, three, four, five, six, seven, eight, nine, 10 or more amino acid substitutions. In some embodiments, the RELA knockin comprises an amino acid sequence that is at least about 60%, 70%, 80%, 90%, 95%, or 99% identical to SEQ ID NO: 2. In some embodiments, the substitution of the RELA knockin is a T448A substitution in SEQ ID NO: 2. In some embodiments, the substitution of the RELA knockin is a S485P substitution in SEQ ID NO: 2. In some embodiments, the substitution of the RELA knockin is a S531P substitution in SEQ ID NO: 2. In some embodiments, the RELA knockin comprises at least one of the T448A, S485P, or S531P substitution amino acid in SEQ ID NO: 2. In some embodiments, the RELA knockin comprises all three T448A, S485P, or S531P amino acid substitutions in SEQ ID NO: 2.

TABLE 1
Sequences of Endogenous RELA

| SEQ | |
|---|---|
| ID | |
| NO | Endogenous RELA Nucleic Acid Sequence |
| 1 | ATGGACGACCTCTTCCCCCTCATCTTCCCCTCGGAGCCGGCCCCGGCCTCG |
| | GGCCCCTATGTGGAGATCATCGAGCAGCCCAAGCAGCGGGGCATGCGCT |
| | TCCGCTACAAGTGCGAGGGCCGCTCAGCCGGCAGTATCCCGGGCGAGAG |
| | GAGCACGGATACCACCAAGACCCACCCCACCATCAAGATCAATGGCTAC |
| | ACGGGGCCAGGGACAGTGCGCATCTCCCTGGTCACCAAGGACCCCCCTCA |
| | CCGGCCTCACCCCCATGAGCTCGTGGGGAAAGACTGCCGGGATGGCTTCT |
| | ATGAGGCTGAGCTCTGCCCAGACCGCTGCATCCACAGCTTCCAGAACCTG |
| | GGGATCCAGTGTGTAAAGAAGCGGGACCTGGAACAGGCCATCAATCAGC |
| | GCATCCAGACCAACAACAACCCCTTCCAAGTTCCCATAGAAGAGCAGCG |
| | CGGGGACTACGACCTGAATGCTGTGCGGCTCTGCTTCCAGGTGACAGTGC |
| | GGGACCCAGCAGGCAGGCCCCTCCGCCTGCCGCCTGTCCTCTCTCACCCC |
| | ATCTTTGACAACCGTGCCCCCAACACTGCAGAGCTCAAGATCTGCCGGGT |
| | GAATCGGAACTCGGGGAGCTGCCTTGGGGGCGATGAGATCTTCCTGCTGT |
| | GCGACAAGGTGCAGAAAGAGGACATCGAGGTGTATTTCACGGGCCCGGG |
| | CTGGGAGGCCCGAGGCTCCTTTTCACAAGCCGACGTGCACCGACAAGTGG |
| | CCATCGTGTTCCGGACGCCTCCCTACGCGGACCCCAGCCTGCAGGCCCCC |
| | GTGCGCGTCTCCATGCAGCTGCGGCGGCCTTCGGATCGGGAGCTCAGCGA |
| | GCCCATGGAATTCCAGTACTTGCCAGACACAGATGACCGGCACCGGATTG |
| | AGGAGAAACGCAAAAGGACCTATGAGACCTTTAAGAGCATCATGAAGAA |
| | GAGTCCTTTCAATGGACCCACCGACCCCCGGCCTGCAACCCGGCGCATTG |
| | CTGTGCCTTCCCGCAGCTCAGCTTCCGTCCCCAAGCCAGCTCCCCAGCCCT |
| | ATCCCTTTACGCCATCTCTCAGCACCATCAACTTTGACGAGTTCACGCCCA |
| | TGGCCTTTGCTTCTGGGCAGATCCCAGGCCAGACCTCAGCCTTGGCCCCA |
| | GCCCCTGCCCCAGTCCTGGTCCAGGCCCCAGCCCCGGCCCCAGCCCCAGC |
| | CATGGCATCAGCTCTGGCCCAGGCCCCAGCCCCTGTCCCCGTCCTAGCCC |
| | CCGGCCTTGCTCAGGCTGTGGCCCCGCCTGCCCCTAAAACCAACCAGGCT |
| | GGGGAAGGGACACTGACAGAGGCCCTGCTGCAGCTGCAGTTTGATACTG |
| | ATGAGGACCTGGGGGCCCTGCTCGGCAATAACACTGACCCGACCGTGTTC |
| | ACGGACCTGGCATCCGTCGACAACTCTGAGTTTCAGCAGCTGCTGAACCA |
| | GGGTGTATCCATGCCCCCCCACACAGCTGAGCCCATGCTGATGGAGTACC |
| | CTGAGGCTATAACTCGCTTGGTGACAGGGTCCCAGAGACCCCCTGACCCA |
| | GCTCCCACTCCCCTGGGGGCCTCTGGGCTCACCAACGGTCTCCTCTCGGG |
| | GGACGAAGACTTCTCCTCCATTGCGGACATGGACTTCTCAGCCCTTCTGA |
| | GTCAGATCAGCTCCTAA |
| SEQ | |
| ID | |
| NO | Endogenous RELA Amino Acid Sequence |
| 2 | MDDLFPLIFPSEPAPASGPYVEIIEQPKQRGMRFRYKCEGRSAGSIPGERSTDT |
| | TKTHPT |
| | IKINGYTGPGTVRISLVTKDPPHRPHPHELVGKDCRDGFYEAELCPDRCIHSF |
| | QNLGIQC |
| | VKKRDLEQAINQRIQTNNNPFQVPIEEQRGDYDLNAVRLCFQVTVRDPAGRP |
| | LRLPPVLS |
| | HPIFDNRAPNTAELKICRVNRNSGSCLGGDEIFLLCDKVQKEDIEVYFTGPGW |
| | EARGSFS |
| | QADVHRQVAIVFRTPPYADPSLQAPVRVSMQLRRPSDRELSEPMEFQYLPDT |
| | DDRHRIEE |
| | KRKRTYETFKSIMKKSPFNGPTDPRPATRRIAVPSRSSASVPKPAPQPYPFTPS |
| | LSTINF |
| | DEFTPMAFASGQIPGQTSALAPAPAPVLVQAPAPAPAPAMASALAQAPAPVP |
| | VLAPGLAQ |
| | DNSEFQQLL |
| | AVAPPAPKTNQAGEGTLTEALLQLQFDTDEDLGALLGNNTDPTVFTDLASV |
| | NQGVSMPPHTAEPMLMEYPEAITRLVTGSQRPPDPAPTPLGASGLTNGLLSG |
| | DEDFSSIA |
| | DMDFSALLSQISS |

[0078] In some embodiments, the RELA knockin comprises substituting the endogenous RELA with a homologous RELA or a fragment thereof. In some embodiments, the homologous RELA or a fragment thereof comprises a nucleic acid sequence that is at least 60%, 70%, 80%, 90%, 95%, or 99% identical to NCBI accession number FN999989.1 (SEQ ID NO: 3, Table 2). In some embodiments, the homologous RELA comprises an amino acid sequence that is at least 60%, 70%, 80%, 90%, 95%, or 99% identical to SEQ ID NO: 4 (Table 2). In some embodiments, the homologous RELA or a fragment thereof comprises a nucleic acid sequence that is at least 60%, 70%, 80%, 90%, 95%, or 99% identical to SEQ ID NO: 5 (Table 2). In some embodiments, the homologous RELA or the fragment thereof is one or more of exon 1, exon 2, exon 3, exon, 4, exon 5, exon 6, exon 7, exon 8, exon 9, exon 10, exon 11, exon 12, or exon 13. In some embodiments, the homologous RELA or the fragment thereof comprises exon 13. In some embodiments, the homologous RELA comprises a nucleic acid sequence that is at least 60%, 70%, 80%, 90%, 95%, or 99% identical to SEQ ID NO: 1. In some embodiments, the homologous RELA or the fragment thereof comprises an amino acid sequence that is at least 60%, 70%, 80%, 90%, 95%, or 99% identical to SEQ ID NO: 2. In some embodiments, the homologous RELA differs from the endogenous RELA by at least one, two, three, four, five, six, seven, eight, nine, ten, or more amino acids. In some embodiments, the homologous RELA differs from the endogenous RELA at any one of amino acid locations 448, 485, or 531 of SEQ ID NO: 2. In some embodiments, the difference between the homologous RELA and the endogenous RELA comprises T448A, S485P, or S531P amino acid substitutions of SEQ ID NO: 2.

TABLE 2
Sequences of Homologous RELA

| SEQ | |
|---|---|
| ID | |
| NO | Nucleic Acid Sequence of RELA, NCBI accession number FN999989.1 |
| 3 | GACCTCTTCCCCCTCATCTTCCCCTCGGAGCCGGCCCCGGCCTCAGGCCCC |
| | TATGTGGAGATCATCGAGC |
| | AGCCCAAGCAGCGGGGCATGCGCTTCCGCTACAAGTGTGAGGGCCGCTCA |
| | GCCGGCAGTATCCCGGGCGA |
| | GAGGAGCACGGATACCACCAAGACCCACCCCACCATCAAGATCAATGGC |
| | TACACAGGGCCAGGGACAGTG |
| | CGCATCTCCCTGGTCACTAAGGACCCCCCTCACCGGCCTCACCCCCATGA |
| | GCTCGTGGGGAAAGACTGCC |
| | GGGATGGCTTCTATGAGGCTGAGCTCTGCCCGGACCGCTGCATCCACAGC |
| | TTCCAGAACCTGGGGATCCAGTGTGTAAAGAAGCGGGACCTGGAACAGG |
| | CCATCAATCAGCGCATCCAGACCAACAATAACCCCTTCCAA |
| | GTTCCCATAGAAGAGCAGCGCGGGGACTACGACCTGAATGCTGTGCGGCT |
| | CTGCTTCCAGGTGACAGTGC |
| | GGGACCCAGCAGGCAGGCCCCTCCGCCTGCCGCCTGTCCTCTCTCACCCC |
| | ATCTTTGACAACCGTGCCCC |
| | CAACACTGCAGAGCTCAAGATCTGTCGGGTGAATCGGAACTCCGGGAGCT |
| | GCCTTGGGGGCGATGAGATC |
| | TTCCTGCTGTGCGACAAGGTGCAGAAAGAGGACATCGAGGTGTATTTCAC |
| | GGGCCCGGGCTGGGAGGCCC |
| | GAGGCTCCTTTTCACAAGCCGACGTGCACCGACAAGTGGCCATCGTGTTC |
| | CGGACGCCTCCCTACGCGGA |
| | CCCCAGCCTGCAGGCCCCCGTGCGCGTCTCCATGCAGCTGCGGCGGCCTT |
| | CGGATCGGGAGCTCAGCGAG |
| | CCCATGGAATTCCAGTACTTGCCAGACACAGATGACCGGCACCGGATTGA |
| | GGAGAAACGCAAAAGGACCT |
| | ATGAGACCTTTAAGAGCATCATGAAGAAGAGTCCTTTCAACGGACCCACC |
| | GACCCCCGGCCTGCAACCCG |
| | GCGCATTGCTGTGCCTTCCCGCAGCTCAGCTTCCGTCCCCAAGCCAGCTCC |
| | CCAGCCCTATCCCTTTACG |
| | CCATCTCTCAGCACCATCAACTTTGACGAGTTCACGCCCATGGCCTTTGCT |
| | TCTGGGCAGATCCCAGGCC |
| | AGACCTCAGCCTTGGCCCCAGCCCCTGCCCCAGTCCTGGTCCAGGCCCCA |
| | GCCCCGGCCCCAGCCCCAGC |
| | CATGGCATCAGCTCTGGCCCAGGCCCCAGCCCCTGTCCCTGTCCTAGCCCC |
| | CGGCCTTGCTCAGGCTGTG |
| | GCCCCGCCTGCCCCTAAAACCAACCAGGCTGGGGAAGGGACACTGACAG |
| | AGGCCCTGCTGCAGCTGCAGT |
| | TTGATGCTGATGAGGACCTGGGGGCCCTGCTCGGCAATAACACTGACCCG |
| | ACCGTGTTCACGGACCTGGC |
| | ATCCGTCGACAACTCTGAGTTTCAGCAGCTGCTGAACCAGGGTGTACCCA |
| | TGCCCCCCCACACAGCTGAG |
| | CCCATGCTGATGGAGTACCCTGAGGCTATAACTCGCTTGGTGACAGGGTC |
| | CCAGAGACCCCCTGACCCAG |
| | CTCCCACTCCCCTGGGGGCCTCTGGGCTCACCAACGGTCTCCTCCCGGGG |
| | GACGAAGACTTCTCCTCCAT |
| | TGCGGACATGGACTTCTCAGCCCTTCTGAGTCAGATCAGCTCCTAA |
| SEQ | |
| ID | Amino |
| NO | Acid Sequence of RELA Encoded by NCBI accession number FN999989.1 |
| 4 | DLFPLIFPSEPAPASGPYVEIIEQPKQRGMRFRYKCEGRSAGSIPGERSTDTTKT |
| | HPTIKINGYTGPGTVRISLVTKDPPHRPHPHELVGKDCRDGFYEAELCPDRCIH |
| | SFQNLGIQCVKKRDLEQAINQRIQTNNNPFQVPIEEQRGDYDLNAVRLCFQVT |
| | VRDPAGRPLRLPPVLSHPIFDNRAPNTAELKICRVNRNSGSCLGGDEIFLLCDK |
| | VQKEDIEVYFTGPGWEARGSFSQADVHRQVAIVFRTPPYADPSLQAPVRVSM |
| | QLRRPSDRELSEPMEFQYLPDTDDRHRIEEKRKRTYETFKSIMKKSPFNGPTD |
| | PRPATRRIAVPSRSSASVPKPAPQPYPFTPSLSTINFDEFTPMAFASGQIPGQTS |
| | ALAPAPAPVLVQAPAPAPAPAMASALAQAPAPVPVLAPGLAQAVAPPAPKT |
| | NQAGEGTLTEALLQLQFDADEDLGALLGNNTDPTVFTDLASVDNSEFQQLLN |
| | QGVPMPPHTAEPMLMEYPEAITRLVTGSQRPPDPAPTPLGASGLTNGLLPGDE |
| | DFSSIADMDFSALLSQISS |
| SEQ | |
| ID | Nucleic Acid |
| NO | Sequence of a Fragment of RELA, NCBI accession number FN999989.1 |
| 5 | GCTGTGGCCCCGCCTGCACCGAAGACGAATCAAGCAGGTGAAGGGACAC |
| | TGACAGAGGCCCTGCTGCAGCTGCAGTTTGATGCTGATGAGGACCTGGGG |
| | GCCCTGCTCGGCAATAACACTGACCCGACCGTGTTCACGGACCTGGCATC |
| | CGTCGACAACTCTGAGTTTCAGCAGCTGCTGAACCAGGGTGTACCCATGC |
| | CCCCCCACACAGCTGAGCCCATGCTGATGGAGTACCCTGAGGCTATAACT |
| | CGCTTGGTGACAGGGTCCCAGAGACCCCCTGACCCAGCTCCCACTCCCCT |
| | GGGGGCCTCTGGGCTCACCAACGGTCTCCTCCCGGGGGACGAAGACTTCT |
| | CATCTATAGCTGATATGGATTTCTCAGCCCTTCTGAGTCAGATCAGCTCCT |
| | AA |

[0079] In some embodiments, the genetically modified cell, tissue, organ, or non-human mammal comprising the modified RELA exhibits enhanced resistance to viral infection as compared to a control cell, tissue, organ, or non-human mammal. In some embodiments, the genetically modified cell, tissue, organ, or non-human mammal comprising the modified RELA exhibits enhanced resistance to ASFV infection.

[0080] In some embodiments, the one or more modified endogenous genes comprises modified genetic content. In some embodiments, the modified genetic content comprises the modified endogenous genes described herein. In some embodiments, the modified genetic content comprises modifying transcript or expression level of the endogenous genes described herein. In some embodiments, the modified genetic content comprises targeting and cleaving transcript of 1, 2, 3, 4, 5, 6, 7, 8, 9, ten, twenty or more endogenous genes described herein. In some instances, the transcript of the one or more modified endogenous genes is reduced by at least 10%, 20%, 30%, 40%, 50%, 60%, 70%, 80%, 90%, 95%, 99%, or 99.9% when compared to transcript of the same endogenous genes that are not modified.

[0081] In some embodiments, the modified genetic content comprises reducing or inhibiting expression of 1, 2, 3, 4, 5, 6, 7, 8, 9, ten, twenty or more endogenous genes described herein. In some instances, the expression of the one or more modified endogenous genes is reduced by at least 10%, 20%, 30%, 40%, 50%, 60%, 70%, 80%, 90%, 95%, 99%, or 99.9% when compared to expression of the same endogenous genes that are not modified. In some embodiments, the expression of the one or more modified endogenous genes is inhibited.

[0082] In some embodiments, the one or more modified endogenous genes can enhance resistance to viral infection in a genetically modified cell, tissue, organ, or non-human mammal compared to control cell, tissue, organ, or non-human mammal (i.e. cell, tissue, organ, or non-human mammal that do not have the one or more modified endogenous genes nor modified genetic content) as determined by measurements of viral infectivity or viral titer. Exemplary measurements of viral resistant or viral infectivity can include viral plaque assay, fluorescent focus assay (FFA) and endpoint dilution assay (TCID50). Each of these three assays can rely on serial viral dilutions added to cells to measure viral infectivity. Other exemplary measurements for determining viral resistance can include qPCR or ELISA for quantifying the amount of viral genome or particle necessary to infect a set number of cells. In some embodiments, the one or more modified endogenous genes can enhance resistance to viral infection caused any of the virus described herein. In some embodiments, the one or more modified endogenous genes can enhance resistance to viral infection caused by at least two families of virus. In some embodiments, the one or more modified endogenous genes can enhance resistance to viral infection caused by at least three families of virus. In some embodiments, the one or more modified endogenous genes can enhance resistance to viral infection caused by at least two genera of virus. In some embodiments, the one or more modified endogenous genes can enhance resistance to viral infection caused by at least three genera of virus. In some embodiments, the one or more modified endogenous genes can enhance resistance to viral infection caused by at least two strains of virus. In some embodiments, the one or more modified endogenous genes can enhance resistance to viral infection caused by at least three strains of virus.

### Genetically Modified Cell

[0083] Described herein, in some embodiments, is genetically modified cell harboring genetic modification of one or more endogenous genes described herein. In some embodiments, the genetically modified cell is used to generate genetically modified tissue, organ, or non-human animal. In some embodiments, the genetically modified cell, tissue, organ, or non-human mammal comprises multiple copies of one or more modified endogenous genes described herein. For example, the genetically modified cell, tissue, organ, or non-human mammal comprises 1, 2, 3, 4, 5, 6, 7, 8, 9, 10, 15, 20, 25, 30, or more of one or more modified endogenous genes.

[0084] In some embodiments, the genetically modified cell is a primary cell. In some embodiments, the genetically modified cell is a somatic cell. In some embodiments, the genetically modified cell is a post-natal cell. In some embodiments, the genetically modified cell is an adult cell. In some embodiments, the genetically modified cell is a fetal cell. In some cases, the genetically modified cell is an embryonic cell (e.g., an embryonic blastomere). In some embodiments, the genetically modified cell is a progenitor cell. In some embodiments, the genetically modified cell is a mesenchymal stem cell. In some embodiments, the genetically modified cell is a germ line cell. In some embodiments, the genetically modified cell is an oocyte. In some embodiment, the genetically modified cell is an zygote. In some embodiments, the genetically modified cell is a stem cell. In some embodiment, the genetically modified cell is an embryonic stem cell. In some instances, the genetically modified cell is an induce pluripotent stem cell (iPSC). In some embodiments, the genetically modified cell is derived from a cell line. In some embodiments, the genetically modified cell is from a primary cell line. In some embodiments, the genetically modified cell is a muscle cell, a skin cell, a blood cell, or an immune cell. Other exemplary cells for generating the genetically modified cells can include lymphoid cells, such as B cell, T cell (Cytotoxic T cell, Natural Killer T cell, Regulatory T cell, T helper cell), Natural killer cell, cytokine induced killer (CIK) cells; myeloid cells, such as granulocytes (Basophil granulocyte, Eosinophil granulocyte, Neutrophil granulocyte/Hypersegmented neutrophil), Monocyte/Macrophage, Red blood cell (Reticulocyte), Mast cell, Thrombocyte/Megakaryocyte, Dendritic cell; cells from the endocrine system, including thyroid (Thyroid epithelial cell, Parafollicular cell), parathyroid (Parathyroid chief cell, Oxyphil cell), adrenal (Chromaffin cell), pineal (Pinealocyte) cells; cells of the nervous system, including glial cells (Astrocyte, Microglia), Magnocellular neurosecretory cell, Stellate cell, Boettcher cell, and pituitary (Gonadotrope, Corticotrope, Thyrotrope, Somatotrope, Lactotroph); cells of the Respiratory system, including Pneumocyte (Type I pneumocyte, Type II pneumocyte), Clara cell, Goblet cell, Dust cell; cells of the circulatory system, including Myocardiocyte, Pericyte; cells of the digestive system, including stomach (Gastric chief cell, Parietal cell), Goblet cell, Paneth cell, G cells, D cells, ECL cells, I cells, K cells, S cells; enteroendocrine cells, including enterochromaffm cell, APUD cell, liver (Hepatocyte, Kupffer cell), Cartilage/bone/muscle; bone cells, including Osteoblast, Osteocyte, Osteoclast, teeth (Cementoblast, Ameloblast); cartilage cells, including Chondroblast, Chondrocyte; skin cells, including Trichocyte, Keratinocyte, Melanocyte (Nevus cell); muscle cells, including Myocyte; urinary system cells, including Podocyte, Juxtaglomerular cell, Intraglomerular mesangial cell/Extraglomerular mesangial cell, Kidney proximal tubule brush border cell, Macula densa cell; reproductive system cells, including Spermatozoon, Sertoli cell, Leydig cell, Ovum; and other cells, including Adipocyte, Fibroblast, Tendon cell, Epidermal keratinocyte (differentiating epidermal cell), Epidermal basal cell (stem cell), Keratinocyte of fingernails and toenails, Nail bed basal cell (stem cell), Medullary hair shaft cell, Cortical hair shaft cell, Cuticular hair shaft cell, Cuticular hair root sheath cell, Hair root sheath cell of Huxley's layer, Hair root sheath cell of Henle's layer, External hair root sheath cell, Hair matrix cell (stem cell), Wet stratified barrier epithelial cells, Surface epithelial cell of stratified squamous epithelium of cornea, tongue, oral cavity, esophagus, anal canal, distal urethra and vagina, basal cell (stem cell) of epithelia of cornea, tongue, oral cavity, esophagus, anal canal, distal urethra and vagina, Urinary epithelium cell (lining urinary bladder and urinary ducts), Exocrine secretory epithelial cells, Salivary gland mucous cell (polysaccharide-rich secretion), Salivary gland serous cell (glycoprotein enzyme-rich secretion), Von Ebner's gland cell in tongue (washes taste buds), Mammary gland cell (milk secretion), Lacrimal gland cell (tear secretion), Ceruminous gland cell in ear (wax secretion), Eccrine sweat gland dark cell (glycoprotein secretion), Eccrine sweat gland clear cell (small molecule secretion). Apocrine sweat gland cell (odoriferous secretion, sex-hormone sensitive), Gland of Moll cell in eyelid (specialized sweat gland), Sebaceous gland cell (lipid-rich sebum secretion), Bowman's gland cell in nose (washes olfactory epithelium), Brunner's gland cell in duodenum (enzymes and alkaline mucus), Seminal vesicle cell (secretes seminal fluid components, including fructose for swimming sperm), Prostate gland cell (secretes seminal fluid components), Bulbourethral gland cell (mucus secretion), Bartholin's gland cell (vaginal lubricant secretion), Gland of Littre cell (mucus secretion), Uterus endometrium cell (carbohydrate secretion), Isolated goblet cell of respiratory and digestive tracts (mucus secretion), Stomach lining mucous cell (mucus secretion), Gastric gland zymogenic cell (pepsinogen secretion), Gastric gland oxyntic cell (hydrochloric acid secretion), Pancreatic acinar cell (bicarbonate and digestive enzyme secretion), Paneth cell of small intestine (lysozyme secretion), Type II pneumocyte of lung (surfactant secretion), Clara cell of lung, Hormone secreting cells, Anterior pituitary cells, Somatotropes, Lactotropes, Thyrotropes, Gonadotropes, Corticotropes, Intermediate pituitary cell, Magnocellular neurosecretory cells, Gut and respiratory tract cells, Thyroid gland cells, thyroid epithelial cell, parafollicular cell, Parathyroid gland cells, Parathyroid chief cell, Oxyphil cell, Adrenal gland cells, chromaffin cells, Ley dig cell of testes, Theca interna cell of ovarian follicle, Corpus luteum cell of ruptured ovarian follicle, Granulosa lutein cells, Theca lutein cells, Juxtaglomerular cell (renin secretion), Macula densa cell of kidney, Metabolism and storage cells, Barrier function cells (Lung, Gut, Exocrine Glands and Urogenital Tract), Kidney, Type I pneumocyte (lining air space of lung), Pancreatic duct cell (centroacinar cell), Nonstriated duct cell (of sweat gland, salivary gland, mammary gland, etc.), Duct cell (of seminal vesicle, prostate gland, etc.), Epithelial cells lining closed internal body cavities, Ciliated cells with propulsive function, Extracellular matrix secretion cells, Contractile cells; Skeletal muscle cells, stem cell, Heart muscle cells, Blood and immune system cells, Erythrocyte (red blood cell), Megakaryocyte (platelet precursor), Monocyte, Connective tissue macrophage (various types), Epidermal Langerhans cell, Osteoclast (in bone), Dendritic cell (in lymphoid tissues), Microglial cell (in central nervous system), Neutrophil granulocyte, Eosinophil granulocyte, Basophil granulocyte, Mast cell, Helper T cell, Suppressor T cell, Cytotoxic T cell, Natural Killer T cell, B cell, Natural killer cell, Reticulocyte, Stem cells and committed progenitors for the blood and immune system (various types), Pluripotent stem cells, Totipotent stem cells, Induced pluripotent stem cells, adult stem cells, Sensory transducer cells, Autonomic neuron cells, Sense organ and peripheral neuron supporting cells, Central nervous system neurons and glial cells, Lens cells, Pigment cells, Melanocyte, Retinal pigmented epithelial cell, Germ cells, Oogonium/Oocyte, Spermatid, Spermatocyte, Spermatogonium cell (stem cell for spermatocyte), Spermatozoon, Nurse cells, Ovarian follicle cell, Sertoli cell (in testis), Thymus epithelial cell, Interstitial cells, and Interstitial kidney cells.

[0085] In some embodiments, the genetically modified cell described herein comprises one or more genetically modified endogenous genes. In some embodiments, the genetically modified cell is used to generate genetically modified tissue or organ. In some embodiments, the genetically modified cell is used to generate a genetically modified non-human mammal. In some embodiments, the genetically modified non-human mammal is a genetically modified artiodactyl (hooved animals such as pigs, sheep, or cattle). The genetically modified artiodactyl can include founder as well as progeny of the founders, progeny of the progeny, and so forth, provided that the progeny retain the modified endogenous genes. In some embodiments, the genetically modified artiodactyl is a genetically modified pig. In some embodiments, the genetically modified pig is any of breeds of pig described herein, e.g., agricultural pig breeds.

[0086] In some embodiments, the genetically modified cell, tissue, organ, or non-human mammal described herein comprises modified chromosomal sequence of one or more modified endogenous genes encoding any of the receptor protein, peptidase protein, glycotransferase protein, hydroxylase protein, and ISG protein described herein. In some embodiments, the genetically modified cell, tissue, organ, or non-human mammal comprises one or more modified CD163, ANPEP, GGTA1, CMAH, B4GALNT2, and RELA. In some embodiments, the genetically modified cell, tissue, organ, or non-human mammal comprises modified CD163. In some embodiments, the genetically modified cell, tissue, organ, or non-human mammal comprises modified ANPEP. In some embodiments, the genetically modified cell, tissue, organ, or non-human mammal comprises modified GGTA1. In some embodiments, the genetically modified cell, tissue, organ, or non-human mammal comprises modified CMAH. In some embodiments, the genetically modified cell, tissue, organ, or non-human mammal comprises modified B4GALNT2. In some embodiments, the genetically modified cell, tissue, organ, or non-human mammal comprises modified GGTA1, CMAH, and B4GALNT2. In some embodiments, the genetically modified cell, tissue, organ, or non-human mammal comprises modified RELA. In some embodiments, the genetically modified cell, tissue, organ, or non-human mammal comprises modified CD163, modified ANPEP, modified GGTA1, modified CMAH, modified B4GALNT2, and modified RELA. In some embodiments, the genetically modified cell, tissue, organ, or non-human mammal comprises modified CD163, modified ANPEP, modified GGTA1, modified CMAH, and modified B4GALNT2. In some embodiments, the genetically modified cell, tissue, organ, or non-human mammal comprises modified CD163, modified ANPEP, and modified RELA. In some embodiments, the genetically modified cell, tissue, organ, or non-human mammal comprises modified CD163 and modified ANPEP. In some embodiments, the genetically modified cell, tissue, organ, or non-human mammal comprises modified CD163, modified GGTA1, modified CMAH, and modified B4GALNT2. In some embodiments, the genetically modified cell, tissue, organ, or non-human mammal comprises modified CD163 and modified RELA. In some embodiments, the genetically modified cell, tissue, organ, or non-human mammal comprises modified ANPEP, modified GGTA1, modified CMAH, and modified B4GALNT2. In some embodiments, the genetically modified cell, tissue, organ, or non-human mammal comprises modified ANPEP and modified RELA.

[0087] In some embodiments, the genetically modified cell, tissue, organ, or non-human mammal comprises CD163 knockout. In some embodiments, the genetically modified cell, tissue, organ, or non-human mammal comprises ANPEP knockout. In some embodiments, the genetically modified cell, tissue, organ, or non-human mammal comprises GGTA1 knockout. In some embodiments, the genetically modified cell, tissue, organ, or non-human mammal comprises CMAH knockout. In some embodiments, the genetically modified cell, tissue, organ, or non-human mammal comprises B4GALNT2 knockout. In some embodiments, the genetically modified cell, tissue, organ, or non-human mammal comprises GGTA1 knockout, CMAH knockout, and B4GALNT2 knockout. In some embodiments, the genetically modified cell, tissue, organ, or non-human mammal comprises RELA knockin. In some embodiments, the genetically modified cell, tissue, organ, or non-human mammal comprises CD163 knockout, ANPEP knockout, GGTA1 knockout, CMAH knockout, B4GALNT2 knockout, and RELA knockin. In some embodiments, the genetically modified cell, tissue, organ, or non-human mammal comprises CD163 knockout, ANPEP knockout, GGTA1 knockout, CMAH knockout, and B4GALNT2 knockout. In some embodiments, the genetically modified cell, tissue, organ, or non-human mammal comprises CD163 knockout, ANPEP knockout, and RELA knockin. In some embodiments, the genetically modified cell, tissue, organ, or non-human mammal comprises CD163 knockout and ANPEP knockout. In some embodiments, the genetically modified cell, tissue, organ, or non-human mammal comprises CD163 knockout, GGTA1 knockout, CMAH knockout, and B4GALNT2 knockout. In some embodiments, the genetically modified cell, tissue, organ, or non-human mammal comprises CD163 knockout and RELA knockin. In some embodiments, the genetically modified cell, tissue, organ, or non-human mammal comprises ANPEP knockout, GGTA1 knockout, CMAH knockout, and B4GALNT2 knockout. In some embodiments, the genetically modified cell, tissue, organ, or non-human mammal comprises ANPEP knockout and RELA knockin.

[0088] In some embodiments, the genetically modified non-human mammal is a genetically modified pig of any one of the breed of pigs described herein. In some embodiments, the genetically modified pig comprises modified CD163. In some embodiments, the genetically modified pig comprises modified ANPEP. In some embodiments, the genetically modified pig comprises modified GGTA1. In some embodiments, the genetically modified pig comprises modified CMAH. In some embodiments, the genetically modified pig comprises modified B4GALNT2. In some embodiments, the genetically modified pig comprises modified GGTA1, modified CMAH, and modified B4GALNT2. In some embodiments, the genetically modified pig comprises modified RELA. In some embodiments, the genetically modified pig comprises modified CD163, modified ANPEP, modified GGTA1, modified CMAH, modified B4GALNT2, and modified RELA. In some embodiments, the genetically modified pig comprises modified CD163, modified ANPEP, modified GGTA1, modified CMAH, and modified B4GALNT2. In some embodiments, the genetically modified pig comprises modified CD163, modified ANPEP, and modified RELA. In some embodiments, the genetically modified pig comprises modified CD163 and modified ANPEP. In some embodiments, the genetically pig comprises modified CD163, modified GGTA1, modified CMAH, and modified B4GALNT2. In some embodiments, the genetically modified pig comprises modified CD163 and modified RELA. In some embodiments, the genetically modified pig comprises modified ANPEP, modified GGTA1, modified CMAH, and modified B4GALNT2. In some embodiments, the genetically modified pig comprises modified ANPEP and modified RELA.

[0089] In some embodiments, the genetically modified pig comprises CD163 knockout. In some embodiments, the genetically modified pig comprises ANPEP knockout. In some embodiments, the genetically modified pig comprises GGTA1 knockout. In some embodiments, the genetically modified pig comprises CMAH knockout. In some embodiments, the genetically modified pig comprises B4GALNT2 knockout. In some embodiments, the genetically modified pig comprises GGTA1 knockout, knockout of CMA, and B4GALNT2 knockout. In some embodiments, the genetically modified pig comprises RELA knockin. In some embodiments, the genetically modified pig comprises CD163 knockout, ANPEP knockout, GGTA1 knockout, CMAH knockout, B4GALNT2 knockout, and RELA knockin. In some embodiments, the genetically modified pig comprises CD163 knockout, ANPEP knockout, GGTA1 knockout, CMAH knockout, and B4GALNT2 knockout. In some embodiments, the genetically modified pig comprises CD163 knockout, ANPEP knockout, and RELA knockin. In some embodiments, the genetically modified pig comprises CD163 knockout and ANPEP knockout. In some embodiments, the genetically pig comprises CD163 knockout, GGTA1 knockout, CMAH knockout, and B4GALNT2 knockout. In some embodiments, the genetically modified pig comprises CD163 knockout and RELA knockin. In some embodiments, the genetically modified pig comprises ANPEP knockout, GGTA1 knockout, CMAH knockout, and B4GALNT2 knockout. In some embodiments, the genetically modified pig comprises ANPEP knockout and RELA knockin.

[0090] In some embodiments, the genetically modified cell, tissue, organ, or non-human mammal comprises a composition comprising at least one heterologous polynucleotide and/or at least one heterologous polypeptide. In some embodiments, the heterologous polynucleotide encodes the at least one heterologous polypeptide. In some embodiments, the heterologous polynucleotide encodes at least one guide nucleic acid. In some embodiments, the heterologous polynucleotide is integrated into the chromosome. In some embodiments, the heterologous polynucleotide is not integrated into the chromosome. In some embodiments, the heterologous polypeptide comprises a gene regulating moiety. In some embodiments, the gene regulating moiety is complexed with the at least one guide nucleic acid to modify the chromosomal sequence of the one or more endogenous genes as described herein. In some embodiments, the gene regulating moiety is complexed with the at least one guide nucleic acid to target one or more of the endogenous genes described herein. In some embodiments, the gene regulating moiety is complexed with the at least one guide nucleic acid to target transcript of one or more of the endogenous genes. In some embodiments, the gene regulating moiety is complexed with the at least one guide nucleic acid to regulate expression of one or more of the endogenous genes.

[0091] In some embodiments, the genetically modified cell, tissue, organ, or non-human mammal comprises modified genetic content. In some embodiments, the modified genetic content comprises the modified chromosomal sequence of the one or more endogenous genes described herein. In some embodiments, the modified genetic content comprises modifying transcript or expression level of the one or more endogenous genes described herein. In some embodiments, the genetically modified cell, tissue, organ, or non-human mammal comprises one or more heterologous polypeptide comprising a gene regulating moiety. In some embodiments, the gene regulating moiety is a nucleic acid-guided nuclease. In some embodiments, the nucleic acid-guided nuclease is complexed with at least one guide nucleic acid to target and cleave transcript of any one of the endogenous genes described herein. In some embodiments, the nucleic acid-guided nuclease is complexed with at least one guide nucleic acid to target and cleave transcript of at least two endogenous genes described herein. In some embodiments, the nucleic acid-guided nuclease is complexed with at least one guide nucleic acid to target and cleave transcript of at least three endogenous genes described herein. In some embodiments, the nucleic acid-guided nuclease is complexed with at least one guide nucleic acid to target and cleave transcript of at least four endogenous genes described herein. In some embodiments, the nucleic acid-guided nuclease is complexed with at least one guide nucleic acid to target and cleave transcript of at least five endogenous genes described herein. In some embodiments, the nucleic acid-guided nuclease is complexed with at least one guide nucleic acid to target and cleave transcript of 1, 2, 3, 4, 5, 6, 7, 8, 9, ten, twenty or more of the endogenous genes described herein. In some embodiments, the nucleic acid-guided nuclease is complexed with at least one guide nucleic acid to target and cleave transcripts of one or more endogenous genes. In some embodiments, transcript of the one or more endogenous genes is targeted, cleaved, and reduced by the nucleic acid-guided nuclease by at least 10%, 20%, 30%, 40%, 50%, 60%, 70%, 80%, 90%, 95%, 99%, or 99.9% when compared to transcript of the one or more endogenous genes not being targeted and cleaved by the nucleic acid-guided nuclease.

[0092] In some cases, a first nucleic acid-guided nuclease is complexed with a first guide nucleic acid to target and cleave a first transcript, while a second nucleic acid-guided nuclease is complexed with a second guide nucleic acid to target and cleave a second transcript. The first nucleic acid-guided nuclease and the second nucleic acid-guided nuclease can be of the same type or different types of a nuclease, as provided herein. The first guide nucleic acid and the second guide nucleic acid can be the same or different. The first transcript and the second transcript can be parts of the same endogenous gene or different endogenous genes. In some examples, a cell can comprise or express both of the first guide nucleic acid and the second guide nucleic acid simultaneously, e.g., for multiplexed targeting of one or more target endogenous genes.

[0093] In some embodiments, the nucleic acid-guided nuclease is complexed with at least one guide nucleic acid to target and cleave transcript of any one CD163, ANPEP, GGTA1, CMAH, B4GALNT2, and RELA. In some embodiments, the nucleic acid-guided nuclease is complexed with at least one guide nucleic acid to target and cleave transcript of CD163. In some embodiments, the nucleic acid-guided nuclease is complexed with at least one guide nucleic acid to target and cleave transcript of ANPEP. In some embodiments, the nucleic acid-guided nuclease is complexed with at least one guide nucleic acid to target and cleave transcript of GGTA1. In some embodiments, the nucleic acid-guided nuclease is complexed with at least one guide nucleic acid to target and cleave transcript of CMAH. In some embodiments, the nucleic acid-guided nuclease is complexed with at least one guide nucleic acid to target and cleave transcript of B4GALNT2. In some embodiments, the nucleic acid-guided nuclease is complexed with at least one guide nucleic acid to target and cleave transcript of RELA. In some embodiments, the nucleic acid-guided nuclease is complexed with at least one guide nucleic acid to target and cleave transcript of CD163 to confer enhanced resistance to infection caused by PRRSV in a genetically modified cell, tissue, organ, or non-human mammal. In some embodiments, the nucleic acid-guided nuclease is complexed with at least one guide nucleic acid to target and cleave transcript of CD163 to confer enhanced resistance to infection caused by ASFV in a genetically modified cell, tissue, organ, or non-human mammal. In some embodiments, the nucleic acid-guided nuclease is complexed with at least one guide nucleic acid to target and cleave transcript of CD163 to confer enhanced resistance to infection caused by PRRSV and ASFV in a genetically modified cell, tissue, organ, or non-human mammal. In some embodiments, the nucleic acid-guided nuclease is complexed with at least one guide nucleic acid to target and cleave transcripts of CD163 and ANPEP to confer enhanced resistance to infection caused by PRRSV and TGEV in a genetically modified cell, tissue, organ, or non-human mammal. In some embodiments, the nucleic acid-guided nuclease is complexed with at least one guide nucleic acid to target and cleave transcripts of CD163 and ANPEP to confer enhanced resistance to infection caused by ASFV and TGEV in a genetically modified cell, tissue, organ, or non-human mammal. In some embodiments, the nucleic acid-guided nuclease is complexed with at least one guide nucleic acid to target and cleave transcripts of CD163 and ANPEP to confer enhanced resistance to infection caused by PRRSV, ASFV, and TGEV in a genetically modified cell, tissue, organ, or non-human mammal. In some embodiments, the nucleic acid-guided nuclease is complexed with at least one guide nucleic acid to target and cleave transcripts of CD163, GGTA1, CMAH, and B4GALNT2 to confer enhanced resistance to infection caused by PRRSV and ASFV in a genetically modified cell, tissue, organ, or non-human mammal. In some embodiments, the nucleic acid-guided nuclease is complexed with at least one guide nucleic acid to target and cleave transcripts of CD163 and RELA to confer enhanced resistance to infection caused by PRRSV and ASFV in a genetically modified cell, tissue, organ, or non-human mammal. In some embodiments, the nucleic acid-guided nuclease is complexed with at least one guide nucleic acid to target and cleave transcripts of ANPEP, GGTA1, CMAH, and B4GALNT2 to confer enhanced resistance to infection caused by TGEV and ASFV in a genetically modified cell, tissue, organ, or non-human mammal. In some embodiments, the nucleic acid-guided nuclease is complexed with at least one guide nucleic acid to target and cleave transcripts of ANPEP and RELA to confer enhanced resistance to infection caused by TGEV and ASFV in a genetically modified cell, tissue, organ, or non-human mammal. In some embodiments, the nucleic acid-guided nuclease is complexed with at least one guide nucleic acid to target and cleave transcripts of CD163, ANPEP, GGTA1, CMAH, and B4GALNT2 to confer enhanced resistance to infection caused by PRRSV, TGEV, and ASFV in a genetically modified cell, tissue, organ, or non-human mammal. In some embodiments, the nucleic acid-guided nuclease is complexed with at least one guide nucleic acid to target and cleave transcripts of CD163, ANPEP, and RELA to confer enhanced resistance to infection caused by PRRSV, TGEV, and ASFV in a genetically modified cell, tissue, organ, or non-human mammal.

[0094] Examples of the nucleic acid-guided nuclease can include Class 1 CRISPR-associated (Cas) polypeptides, Class 2 Cas polypeptides, type I Cas polypeptides, type II Cas polypeptides, type III Cas polypeptides, type IV Cas polypeptides, type V Cas polypeptides, type VI Cas polypeptide, CRISPR-associated RNA binding proteins, or a functional fragment thereof. Cas polypeptides suitable for use with the present disclosure can include Cas9, Cas12, Cas13, Cpf1 (or Cas12a), C2C1, C2C2 (or Cas13a), Cas13b, Cas13c, Cas13d, C2C3, Cas1, Cas1B, Cas2, Cas3, Cas4, Cas5, Cas5e (CasD), Cas6, Cas6e, Cas6f, Cas7, Cas8a, Cas8a1, Cas8a2, Cas8b, Cas8c, Csn1, Csx12, Cas10, Cas10d, Cas10, Cas10d, CasF, CasG, CasH, Csy1, Csy2, Csy3, Cse1 (CasA), Cse2 (CasB), Cse3 (CasE), Cse4 (CasC), Csc1, Csc2, Csa5, Csn2, Csm2, Csm3, Csm4, Csm5, Csm6, Cmr1, Cmr3, Cmr4, Cmr5, Cmr6, Csb1, Csb2, Csb3, Csx17, Csx14, Csx10, Csx16, CsaX, Csx3, Csx1, Csx15, Csf1, Csf2, Csf3, Csf4, or Cul966; any derivative thereof; any variant thereof, or any fragment thereof. In some embodiments, Cas13 can include, but are not limited to, Cas13a, Cas13b, Cas13c, and Cas 13d (e.g., CasRx). CRISPR/Cas is DNA and/or RNA cleaving, or exhibits reduced cleavage activity.

[0095] In some instances, the nucleic acid-guided nuclease is a deactivated nuclease, where the nuclease activity of the nucleic acid-guided nuclease is at least partially deactivated. In some embodiment, the nucleic acid-guided nuclease is fused with another gene regulating moiety described herein. In some embodiments, the gene regulating moiety can reduce or inhibit expression of one or more of the endogenous genes described herein. In some embodiments, the gene regulating moiety can reduce or inhibit expression of at least two endogenous genes described herein. In some embodiments, the gene regulating moiety can reduce or inhibit expression of at least three endogenous genes described herein. In some embodiments, the gene regulating moiety can reduce or inhibit expression of at least four endogenous genes described herein. In some embodiments, the gene regulating moiety can reduce or inhibit expression of at least five endogenous genes described herein. In some embodiments, the gene regulating moiety can reduce or inhibit expression of 1, 2, 3, 4, 5, 6, 7, 8, 9, ten, twenty or more endogenous genes described herein. In some embodiments, the gene regulating moiety can reduce or inhibit expression of the one or more of the endogenous genes described herein. In some embodiments, expression of the one or more endogenous genes is targeted and reduced by the gene regulating moiety by at least 10%, 20%, 30%, 40%, 50%, 60%, 70%, 80%, 90%, 95%, 99%, or 99.9% when compared to expression of the one or more endogenous genes not being targeted by the gene regulating moiety. In some embodiments, the expression of the one or more of the endogenous genes is inhibited by the gene regulating moiety.

[0096] In some embodiments, the at least one heterologous polynucleotide encodes at least one guide nucleic acid, said guide nucleic acid can target viral genome, viral genes, or transcript of viral genome of viral genes of any one of the virus described herein. In some embodiments, the genetically modified cell, tissue, organ, or non-human mammal comprises the composition comprising the heterologous polypeptide comprising the nucleic acid-guided nuclease complexed with the at least one guide nucleic acid to target and cleave viral genome, viral genes, or transcript of viral genome or viral genes of 1, 2, 3, 4, 5, 6, 7, 8, 9, ten, twenty or more of the viruses described herein. In some embodiments, the nucleic acid-guided nuclease complexed with at least one guide nucleic acid to target and cleave viral genome, viral genes, or transcript of viral genome or viral genes of at least one virus. In some embodiments, the nucleic acid-guided nuclease complexed with at least one guide nucleic acid to target and cleave viral genome, viral genes, or transcript of viral genome or viral genes of at least two viruses. In some embodiments, the nucleic acid-guided nuclease complexed with at least one guide nucleic acid to target and cleave viral genome, viral genes, or transcript of viral genome or viral genes of at least three viruses. In some embodiments, transcript of the viral genome, viral genes, or transcript of viral genome or viral genes is targeted, cleaved, and reduced by the nucleic acid-guided nuclease by at least 10%, 20%, 30%, 40%, 50%, 60%, 70%, 80%, 90%, 95%, 99%, or 99.9% when compare to transcript of the same viral genome, viral genes, or transcript of viral genome or viral genes not being targeted and cleaved by the nucleic acid-guided nuclease.

[0097] In some embodiments, the genetically modified cell, tissue, organ, or non-human mammal comprises the composition comprising the gene regulating moiety complexed with the at least one guide nucleic acid to reduce or inhibit expression of viral genome or viral genes of one or more of the viruses described herein. In some embodiments, the gene regulating moiety can reduce or inhibit expression of at least two viruses described herein. In some embodiments, the gene regulating moiety can reduce or inhibit expression of at least three viruses described herein. In some embodiments, the gene regulating moiety can reduce or inhibit expression of 1, 2, 3, 4, 5, 6, 7, 8, 9, ten, twenty or more of the viruses described herein. In some embodiments, expression of the one or more of the viruses is targeted and reduced by the gene regulating moiety by at least 10%, 20%, 30%, 40%, 50%, 60%, 70%, 80%, 90%, 95%, 99%, or 99.9% when compared to expression of the same one or more of the viruses not being targeted by the gene regulating moiety. In some embodiments, the expression of the one or more of viruses is inhibited by the gene regulating moiety.

[0098] In some embodiments, the genetically modified cell, tissue, organ, or non-human mammal exhibits enhanced viral resistance compared to control cell, tissue, organ, or non-human mammal as determined by measurements of viral infectivity or viral titer. Exemplary measurements of viral resistant or viral infectivity can include viral plaque assay, fluorescent focus assay (FFA) and endpoint dilution assay (TCID50). Each of these three assays can rely on serial viral dilutions added to cells to measure viral infectivity. Other exemplary measurements for determining viral resistance can include qPCR or ELISA for quantifying the amount of viral genome or particle necessary to infect a set number of cells.

[0099] In some embodiment, the genetically modified cell, tissue, organ, or non-human mammal exhibits enhanced resistance to viral infection compared to control cell, tissue, organ, or non-human mammal by at least about 0.1 fold to about 10,000 fold. In some embodiment, the genetically modified cell, tissue, organ, or non-human mammal exhibits enhanced resistance to viral infection as compared to control cell, tissue, organ, or non-human mammal by at least about 0.1 fold to about 0.2 fold, about 0.1 fold to about 0.5 fold, about 0.1 fold to about 1 fold, about 0.1 fold to about 2 fold, about 0.1 fold to about 5 fold, about 0.1 fold to about 10 fold, about 0.1 fold to about 50 fold, about 0.1 fold to about 100 fold, about 0.1 fold to about 500 fold, about 0.1 fold to about 1,000 fold, about 0.1 fold to about 10,000 fold, about 0.2 fold to about 0.5 fold, about 0.2 fold to about 1 fold, about 0.2 fold to about 2 fold, about 0.2 fold to about 5 fold, about 0.2 fold to about 10 fold, about 0.2 fold to about 50 fold, about 0.2 fold to about 100 fold, about 0.2 fold to about 500 fold, about 0.2 fold to about 1,000 fold, about 0.2 fold to about 10,000 fold, about 0.5 fold to about 1 fold, about 0.5 fold to about 2 fold, about 0.5 fold to about 5 fold, about 0.5 fold to about 10 fold, about 0.5 fold to about 50 fold, about 0.5 fold to about 100 fold, about 0.5 fold to about 500 fold, about 0.5 fold to about 1,000 fold, about 0.5 fold to about 10,000 fold, about 1 fold to about 2 fold, about 1 fold to about 5 fold, about 1 fold to about 10 fold, about 1 fold to about 50 fold, about 1 fold to about 100 fold, about 1 fold to about 500 fold, about 1 fold to about 1,000 fold, about 1 fold to about 10,000 fold, about 2 fold to about 5 fold, about 2 fold to about 10 fold, about 2 fold to about 50 fold, about 2 fold to about 100 fold, about 2 fold to about 500 fold, about 2 fold to about 1,000 fold, about 2 fold to about 10,000 fold, about 5 fold to about 10 fold, about 5 fold to about 50 fold, about 5 fold to about 100 fold, about 5 fold to about 500 fold, about 5 fold to about 1,000 fold, about 5 fold to about 10,000 fold, about 10 fold to about 50 fold, about 10 fold to about 100 fold, about 10 fold to about 500 fold, about 10 fold to about 1,000 fold, about 10 fold to about 10,000 fold, about 50 fold to about 100 fold, about 50 fold to about 500 fold, about 50 fold to about 1,000 fold, about 50 fold to about 10,000 fold, about 100 fold to about 500 fold, about 100 fold to about 1,000 fold, about 100 fold to about 10,000 fold, about 500 fold to about 1,000 fold, about 500 fold to about 10,000 fold, or about 1,000 fold to about 10,000 fold. In some embodiment, the genetically modified cell, tissue, organ, or non-human mammal exhibits enhanced resistance to viral infection as compared to control cell, tissue, organ, or non-human mammal by at least about 0.1 fold, about 0.2 fold, about 0.5 fold, about 1 fold, about 2 fold, about 5 fold, about 10 fold, about 50 fold, about 100 fold, about 500 fold, about 1,000 fold, or about 10,000 fold. In some embodiment, the genetically modified cell, tissue, organ, or non-human mammal exhibits enhanced resistance to viral infection as compared to control cell, tissue, organ, or non-human mammal by at least at least about 0.1 fold, about 0.2 fold, about 0.5 fold, about 1 fold, about 2 fold, about 5 fold, about 10 fold, about 50 fold, about 100 fold, about 500 fold, or about 1,000 fold. In some embodiment, the genetically modified cell, tissue, organ, or non-human mammal exhibits enhanced resistance to viral infection as compared to control cell, tissue, organ, or non-human mammal by at least at most about 0.2 fold, about 0.5 fold, about 1 fold, about 2 fold, about 5 fold, about 10 fold, about 50 fold, about 100 fold, about 500 fold, about 1,000 fold, or about 10,000 fold.

[0100] In some embodiments, the genetically modified cell, tissue, organ, or non-human mammal exhibits enhanced resistance to viral infection caused by virus from at least one family of virus. In some embodiments, the viral infection is caused by viruses from at least two families of virus. In some embodiments, the viral infection is caused by viruses from at least three families of virus. In some embodiments, the viral infection is caused by viruses from 1, 2, 3, 4, 5, 6, 7, 8, 9, 10, or more of families of virus. Non-limiting examples of family of virus can include Abyssoviridae, Ackermannviridae, Adenoviridae, Alphaflexiviridae, Alphasatellitidae, Alphatetraviridae, Alvernaviridae, Amalgaviridae, Amnoonviridae, Ampullaviridae, Anelloviridae, Arenaviridae, Arteriviridae, Artoviridae, Ascoviridae, Asfarviridae, Aspiviridae, Astroviridae, Avsunviroidae, Bacilladnaviridae, Baculoviridae, Barnaviridae, Belpaoviridae, Benyviridae, Betaflexiviridae, Bicaudaviridae, Bidnaviridae, Birnaviridae, Bornaviridae, Botourmiaviridae, Bromoviridae, Caliciviridae, Carmotetraviridae, Caulimoviridae, Chrysoviridae, Chuviridae, Circoviridae, Clavaviridae, Closteroviridae, Coronaviridae, Corticoviridae, Cruliviridae, Cystoviridae, Deltaflexiviridae, Dicistroviridae, Endornaviridae, Euroniviridae, Filoviridae, Fimoviridae, Flaviviridae, Fuselloviridae, Gammaflexiviridae, Geminiviridae, Genomoviridae, Globuloviridae, Guttaviridae, Hantaviridae, Hepadnaviridae, Hepeviridae, Herelleviridae, Herpesviridae, Hypoviridae, Hytrosaviridae, Iflaviridae, Inoviridae, Iridoviridae, Kitaviridae, Lavidaviridae, Leishbuviridae, Leviviridae, Lipothrixviridae, Lispiviridae, Luteoviridae, Malacoherpesviridae, Marnaviridae, Marseilleviridae, Matonaviridae, Medioniviridae, Megabirnaviridae, Mesoniviridae, Metaviridae, Microviridae, Mimiviridae, Mononiviridae, Mymonaviridae, Myoviridae, Mypoviridae, Nairoviridae, Nanoviridae, Narnaviridae, Nimaviridae, Nodaviridae, Nudiviridae, Nyamiviridae, Orthomyxoviridae, Ovaliviridae, Papillomaviridae, Paramyxoviridae, Partitiviridae, Parvoviridae, Peribunyaviridae, Permutotetraviridae, Phasmaviridae, Phenuiviridae, Phycodnaviridae, Picobirnaviridae, Picornaviridae, Plasmaviridae, Pleolipoviridae, Pneumoviridae, Podoviridae, Polycipiviridae, Polydnaviridae, Polyomaviridae, Portogloboviridae, Pospiviroidae, Potyviridae, Poxviridae, Pseudoviridae, Qinviridae, Quadriviridae, Reoviridae, Retroviridae, Rhabdoviridae, Roniviridae, Rudiviridae, Sarthroviridae, Secoviridae, Siphoviridae, Smacoviridae, Solemoviridae, Solinviviridae, Sphaerolipoviridae, Spiraviridae, Sunviridae, Tectiviridae, Tobaniviridae, Togaviridae, Tolecusatellitidae, Tombusviridae, Tospoviridae, Totiviridae, Tristromaviridae, Turriviridae, Tymoviridae, Virgaviridae, Wupedeviridae, Xinmoviridae, or Yueviridae.

[0101] In some embodiments, the genetically modified cell, tissue, organ, or non-human mammal exhibits enhanced resistance to viral infection caused by virus from at least one genus of virus. In some embodiments, the viral infection is caused by viruses from at least two genera of virus. In some embodiments, the viral infection is caused by viruses from at least three genera of virus. In some embodiments, the viral infection is caused by viruses from 1, 2, 3, 4, 5, 6, 7, 8, 9, 10, or more of genera of virus. Non-limiting examples of genus of virus can include Aalivirus, Abidjanvirus, Abouovirus, Acadianvirus, Actinovirus, Agatevirus, Ageyesisatellite, Agnathovirus, Agricanvirus, Agtrevirus, Ahduovirus, Ailurivirus, Albetovirus, Alcyoneusvirus, Alefpapillomavirus, Alfamovirus, Allexivirus, Allolevivirus, Almendravirus, Alphaabyssovirus, Alphaarterivirus, Alphabaculovirus, Alphacarmotetravirus, Alphacarmovirus, Alphachrysovirus, Alphacoronavirus, Alphaendornavirus, Alphaentomopoxvirus, Alphafusellovirus, Alphaguttavirus, Alphainfluenzavirus, Alphaletovirus, Alphamesonivirus, Alphamononivirus, Alphanecrovirus, Alphanemrhavirus, Alphanodavirus, Alphanudivirus, Alphaovalivirus, Alphapapillomavirus, Alphapartitivirus, Alphapermutotetravirus, Alphapleolipovirus, Alphapolyomavirus, Alphaportoglobovirus, Alpharetrovirus, Alphasphaerolipovirus, Alphaspiravirus, Alphatectivirus, Alphatorquevirus, Alphatrevirus, Alphatristromavirus, Alphaturrivirus, Alphavirus, Amalgavirus, Ambidensovirus, Amdoparvovirus, Amigovirus, Ampelovirus, Ampivirus, Ampullavirus, Anativirus, Anatolevirus, Andromedavirus, Anphevirus, Antennavirus, Anulavirus, Aparavirus, Aphroditevirus, Aphthovirus, Apscaviroid, Aquabirnavirus, Aqualcavirus, Aquamavirus, Aquaparamyxovirus, Aquareovirus, Arequatrovirus, Arlivirus, Ascovirus, Asfivirus, Asteriusvirus, Atadenovirus, Attisvirus, Aumaivirus, Aureusvirus, Aurivirus, Avastrovirus, Avenavirus, Aveparvovirus, Aviadenovirus, Avibirnavirus, Avihepadnavirus, Avihepatovirus, Avipoxvirus, Avisivirus, Avsunviroid, Avunavirus, Babusatellite, Babuvirus, Bacillarnavirus, Badnavirus, Bafinivirus, Baltimorevirus, Bantamvirus, Banyangvirus, Barnavirus, Barnyardvirus, Bastillevirus, Batrachovirus, Bavovirus, Baxtervirus, Bcepmuvirus, Bdellomicrovirus, Becurtovirus, Beetrevirus, Begomovirus, Beidivirus, Bendigovirus, Benyvirus, Bequatrovirus, Berhavirus, Bernalvirus, Betaarterivirus, Betabaculovirus, Betacarmovirus, Betachrysovirus, Betacoronavirus, Betaendornavirus, Betaentomopoxvirus, Betafusellovirus, Betaguttavirus, Betainfluenzavirus, Betalipothrixvirus, Betanecrovirus, Betanodavirus, Betanudivirus, Betapapillomavirus, Betapartitivirus, Betapleolipovirus, Betapolyomavirus, Betaretrovirus, Betasatellite, Betasphaerolipovirus, Betatectivirus, Betatetravirus, Betatorquevirus, Betterkatzvirus, Bevemovirus, Bicaudavirus, Bidensovirus, Bifseptvirus, Bignuzvirus, Bingvirus, Biquartavirus, Biseptimavirus, Bixzunavirus, Bjornvirus, Blosnavirus, Blunervirus, Bocaparvovirus, Bolenivirus, Bongovirus, Bopivirus, Bostovirus, Botoulivirus, Botrexvirus, Botybirnavirus, Bovismacovirus, Bovispumavirus, Bowservirus, Bracovirus, Brambyvirus, Brevidensovirus, Britbratvirus, Bromovirus, Bronvirus, Brujitavirus, Brunovirus, Brussowvirus, Bruynoghevirus, Busanvirus, Buttersvirus, Bymovirus, Caeruleovirus, Cafeteriavirus, Caligrhavirus, Camvirus, Capillovirus, Capripoxvirus, Capulavirus, Carbovirus, Cardiovirus, Cardoreovirus, Carlavirus, Casadabanvirus, Caulimovirus, Cavemovirus, Cbastvirus, Cecivirus, Ceduovirus, Ceetrepovirus, Centapoxvirus, Cepunavirus, Cequinquevirus, Certrevirus, Cervidpoxvirus, Cetovirus, Chakrabartyvirus, Charlievirus, Charybnivirus, Chenonavirus, Cheoctovirus, Cheravirus, Chiangmaivirus, Chipapillomavirus, Chipolycivirus, Chivirus, Chlamydiamicrovirus, Chloriridovirus, Chlorovirus, Chordovirus, Chungbukvirus, Chunghsingvirus, Cilevirus, Cimpunavirus, Cinunavirus, Circovirus, Citrivirus, Clavavirus, Clecrusatellite, Closterovirus, Clostunsatellite, Cocadviroid, Coccolithovirus, Coetzeevirus, Coguvirus, Colecusatellite, Coleviroid, Coltivirus, Comovirus, Coopervirus, Copiparvovirus, Corndogvirus, Cornellvirus, Corticovirus, Cosavirus, Cosmacovirus, Crinivirus, Cripavirus, Crocodylidpoxvirus, Crohivirus, Cronusvirus, Crustavirus, Cryspovirus, Cucumovirus, Cuevavirus, Cultervirus, Curiovirus, Curtovirus, Cyclovirus, Cypovirus, Cyprinivirus, Cystovirus, Cytomegalovirus, Cytorhabdovirus, Decapodiridovirus, Decurrovirus, Delepquintavirus, Deltaarterivirus, Deltabaculovirus, Deltacoronavirus, Deltaflexivirus, Deltainfluenzavirus, Deltalipothrixvirus, Deltapapillomavirus, Deltapartitivirus, Deltapolyomavirus, Deltaretrovirus, Deltasatellite, Deltatorquevirus, Deltavirus, Demosthenesvirus, Dependoparvovirus, Detrevirus, Dhakavirus, Dhillonvirus, Dianthovirus, Diatodnavirus, Dichorhavirus, Dicipivirus, Diegovirus, Dinodnavirus, Dinornavirus, Dinovernavirus, Dismasvirus, Divavirus, Doucettevirus, Dragsmacovirus, Drosmacovirus, Drulisvirus, Dyochipapillomavirus, Dyodeltapapillomavirus, Dyoepsilonpapillomavirus, Dyoetapapillomavirus, Dyoiotapapillomavirus, Dyokappapapillomavirus, Dyolambdapapillomavirus, Dyomupapillomavirus, Dyonupapillomavirus, Dyoomegapapillomavirus, Dyoomikronpapillomavirus, Dyophipapillomavirus, Dyopipapillomavirus, Dyopsipapillomavirus, Dyorhopapillomavirus, Dyosigmapapillomavirus, Dyotaupapillomavirus, Dyothetapapillomavirus, Dyoupsilonpapillomavirus, Dyoxipapillomavirus, Dyozetapapillomavirus, Ebolavirus, Eclunavirus, Efquatrovirus, Eiauvirus, Eisenstarkvirus, Elaviroid, Elerivirus, Elvirus, Emalynvirus, Emaravirus, Emdodecavirus, Enamovirus, Eneladusvirus, Enhodamvirus, Enquatrovirus, Enterovirus, Entomobirnavirus, Ephemerovirus, Epsilonarterivirus, Epsilonpapillomavirus, Epsilonretrovirus, Epsilontorquevirus, Equispumavirus, Eragrovirus, Erbovirus, Errantivirus, Erskinevirus, Erythroparvovirus, Etaarterivirus, Etapapillomavirus, Etatorquevirus, Eyrevirus, Fabavirus, Fabenesatellite, Farahnazvirus, Felispumavirus, Felixounavirus, Feravirus, Ferlavirus, Fibrovirus, Ficleduovirus, Fijivirus, Fipvunavirus, Firehammervirus, Fishburnevirus, Flaumdravirus, Flavivirus, Fletchervirus, Foveavirus, Friunavirus, Fromanvirus, Furovirus, Gaiavirus, Galaxyvirus, Gallantivirus, Gallivirus, Galunavirus, Gamaleyavirus, Gammaarterivirus, Gammabaculovirus, Gammacarmovirus, Gammacoronavirus, Gammaentomopoxvirus, Gammainfluenzavirus, Gammalipothrixvirus, Gammapapillomavirus, Gammapartitivirus, Gammapleolipovirus, Gammapolyomavirus, Gammaretrovirus, Gammasphaerolipovirus, Gammatectivirus, Gammatorquevirus, Gamtrevirus, Gaprivervirus, Gelderlandvirus, Gemycircularvirus, Gemyduguivirus, Gemygorvirus, Gemykibivirus, Gemykolovirus, Gemykrogvirus, Gemykroznavirus, Gemytondvirus, Gemyvongvirus, Gequatrovirus, Gesputvirus, Getseptimavirus, Ghobesvirus, Giardiavirus, Gilesvirus, Globulovirus, Glossinavirus, Gofduovirus, Goravirus, Gordonvirus, Gordtnkvirus, Gorganvirus, Gorjumvirus, Gosmusatellite, Goukovirus, Grablovirus, Gustavvirus, Gyrovirus, Habenivirus, Hanrivervirus, Hapavirus, Hapunavirus, Harkavirus, Harrisonvirus, Hartmanivirus, Hawkeyevirus, Hedwigvirus, Helsingorvirus, Hemivirus, Hendrixvirus, Henipavirus, Hepacivirus, Hepandensovirus, Hepatovirus, Herbevirus, Higrevirus, Hollowayvirus, Holosalinivirus, Homburgvirus, Hordeivirus, Horwuvirus, Hostuviroid, Hpunavirus, Hubavirus, Huchismacovirus, Hudivirus, Hudovirus, Hunnivirus, Hupolycivirus, Hypovirus, Iapetusvirus, Ichnovirus, Ichtadenovirus, Ictalurivirus, Idaeovirus, Idnoreovirus, Iflavirus, Ikedavirus, Ilarvirus, Iltovirus, Ilzatvirus, Incheonvrus, Infratovirus, Inhavirus, Inovirus, Inshuvirus, Invictavirus, Iodovirus, Ionavirus, Iotaarterivirus, Iotapapillomavirus, Iotatorquevirus, Ipomovirus, Iridovirus, Isavirus, Iteradensovirus, Ithacavirus, Jasminevirus, Jedunavirus, Jeilongvirus, Jenstvirus, Jerseyvirus, Jesfedecavirus, Jiaodavirus, Jilinvirus, Jimmervirus, Johnsonvirus, Jonvirus, Jwalphavirus, Kabutovirus, Kafunavirus, Kagunavirus, Kairosalinivirus, Kappaarterivirus, Kappapapillomavirus, Kappatorquevirus, Karamvirus, Kayvirus, Kelleziovirus, Kieseladnavirus, Kleczkowskavirus, Klementvirus, Kobuvirus, Kochikohdavirus, Kochitakasuvirus, Kojivirus, Kolesnikvirus, Korravirus, Kostyavirus, Krischvirus, Krylovvirus, Kryptosalinivirus, Kunsagivirus, Kuravirus, Kusarnavirus, Kuttervirus, Labyrnavirus, Lacusarxvirus, Lagovirus, Lambdaarterivirus, Lambdapapillomavirus, Lambdatorquevirus, Lambdavirus, Laroyevirus, Laulavirus, Ledantevirus, Lederbergvirus, Leishmaniavirus, Lentivirus, Leporipoxvirus, Lessievirus, Levivirus, Liefievirus, Lightbulbvirus, Likavirus, Lilyvirus, Limdunavirus, Limestonevirus, Limnipivirus, Lincruvirus, Lineavirus, Litunavirus, Livupivirus, Loanvirus, Locarnavirus, Lokivirus, Lolavirus, Lomovskayavirus, Lubbockvirus, Luteovirus, Luzseptimavirus, Lwoffvirus, Lymphocryptovirus, Lymphocystivirus, Lyssavirus, Macanavirus, Macavirus, Machinavirus, Machlomovirus, Macluravirus, Macronovirus, Maculavirus, Magadivirus, Magoulivirus, Malagasivirus, Mamastrovirus, Mammarenavirus, Mandarivirus, Mapvirus, Marafivirus, Marburgvirus, Mardecavirus, Mardivirus, Marnavirus, Marseillevirus, Marthavirus, Marvinvirus, Mastadenovirus, Mastrevirus, Mavirus, Megabirnavirus, Megalocytivirus, Megrivirus, Metaavulavirus, Metapneumovirus, Metavirus, Metrivirus, Mieseafarmvirus, Milvetsatellite, Mimasvirus, Mimivirus, Mimoreovirus, Minovirus, Minunavirus, Mischivirus, Mitovirus, Mivedwarsatellite, Mivirus, Mobatvirus, Mobuvirus, Moineauvirus, Molluscipoxvirus, Mooglevirus, Moonvirus, Morbillivirus, Mosavirus, Mosigvirus, Muarterivirus, Mudcatvirus, Mupapillomavirus, Muromegalovirus, Muscavirus, Mutorquevirus, Muvirus, Mycoflexivirus, Mycoreovirus, Myohalovirus, Myunavirus, Myxoctovirus, Nacovirus, Nanhaivirus, Nankokuvirus, Nanovirus, Napahaivirus, Narmovirus, Narnavirus, Nazgulvirus, Nebovirus, Negarvirus, Nepovirus, Nickievirus, Nipunavirus, Nitunavirus, Nonagvirus, Nonanavirus, Norovirus, Novirhabdovirus, Novosibvirus, Noxifervirus, Nucleorhabdovirus, Nupapillomavirus, Nutorquevirus, Nyavirus, Nyceiraevirus, Nyfulvavirus, Nymphadoravirus, Obolenskvirus, Okavirus, Okubovirus, Oleavirus, Omegapapillomavirus, Omegatetravirus, Omegavirus, Omikronpapillomavirus, Oncotshavirus, Ophiovirus, Orbivirus, Orchidvirus, Orinovirus, Orivirus, Orthoavulavirus, Orthobornavirus, Orthobunyavirus, Orthohantavirus, Orthohepadnavirus, Orthohepevirus, Orthonairovirus, Orthophasmavirus, Orthopneumovirus, Orthopoxvirus, Orthoreovirus, Orthorubulavirus, Orthotospovirus, Oryzavirus, Oscivirus, Oshimavirus, Oslovirus, Ostreavirus, Otagovirus, Ourmiavirus, Pacuvirus, Pagevirus, Paguronivirus, Pahexavirus, Pakpunavirus, Pamexvirus, Panicovirus, Papanivirus, Papyrusvirus, Paraavulavirus, Parapoxvirus, Pararubulavirus, Parechovirus, Pasivirus, Passerivirus, Patiencevirus, Pbilvirus, Pbunavirus, Peatvirus, Pecentumvirus, Pecluvirus, Peduovirus, Pegivirus, Pegunavirus, Pelamoviroid, Pelarspovirus, Penstyldensovirus, Pepyhexavirus, Percavirus, Perhabdovirus, Perisivirus, Peropuvirus, Pestivirus, Petuvirus, Phaeovirus, Phasivirus, Phayoncevirus, Phicbkvirus, Phietavirus, Phifelvirus, Phikmvvirus, Phikzvirus, Phimunavirus, Phipapillomavirus, Phlebovirus, Phytoreovirus, Picobirnavirus, Pidchovirus, Pikminvirus, Pipapillomavirus, Pipefishvirus, Piscihepevirus, Plaisancevirus, Plasmavirus, Platypuvirus, Plectrovirus, Plotvirus, Poacevirus, Poecivirus, Polemovirus, Polerovirus, Pollyceevirus, Polybotosvirus, Pomovirus, Popoffvirus, Porprismacovirus, Pospiviroid, Potamipivirus, Potexvirus, Potyvirus, Poushouvirus, Pradovirus, Prasinovirus, Pregotovirus, Priunavirus, Proboscivirus, Prosimiispumavirus, Protobacilladnavirus, Protoparvovirus, Prunevirus, Prymnesiovirus, Przondovirus, Psavirus, Pseudovirus, Psimunavirus, Psipapillomavirus, Pulverervirus, Punavirus, Quadrivirus, Quaranjavirus, Rabovirus, Radnorvirus, Rafivirus, Ranavirus, Raphidovirus, Rauchvirus, Ravinvirus, Recovirus, Redivirus, Reptarenavirus, Reptillovirus, Rerduovirus, Respirovirus, Reyvirus, Rhadinovirus, Rhizidiovirus, Rhopapillomavirus, Rigallicvirus, Rimavirus, Ripduovirus, Risingsunvirus, Robigovirus, Rogunavirus, Rosadnavirus, Rosavirus, Rosebushvirus, Rosenblumvirus, Roseolovirus, Rotavirus, Roufvirus, Roymovirus, Rtpvirus, Rubivirus, Rudivirus, Rymovirus, Sadwavirus, Saetivirus, Sakobuvirus, Salasvirus, Salemvirus, Salisharnavirus, Salivirus, Salmonivirus, Salovirus, Salterprovirus, Samistivirus, Samunavirus, Sanovirus, Sapelovirus, Saphexavirus, Sapovirus, Sasvirus, Saundersvirus, Sawastrivirus, Scapunavirus, Schizotequatrovirus, Schmidvirus, Sclerodarnavirus, Sclerotimonavirus, Scleroulivirus, Scutavirus, Seadornavirus, Sectovirus, Semotivirus, Senecavirus, Seoulvirus, Septimatrevirus, Sepunavirus, Sequivirus, Sertoctavirus, Seunavirus, Seuratvirus, Sextaecvirus, Shalavirus, Shanbavirus, Shangavirus, Shaspivirus, Shilevirus, Siadenovirus, Sicinivirus, Sigmapapillomavirus, Sigmavirus, Silviavirus, Simiispumavirus, Siminovitchvirus, Simplexvirus, Sinaivirus, Sinsheimervirus, Sirevirus, Sitaravirus, Skunavirus, Slashvirus, Slopekvirus, Smoothievirus, Sobemovirus, Socyvirus, Sogarnavirus, Solendovirus, Sophoyesatellite, Sopolycivirus, Soupsvirus, Sourvirus, Soymovirus, Spbetavirus, Spiromicrovirus, Sprivivirus, Sputnikvirus, Sripuvirus, Stanholtvirus, Steinhofvirus, Striavirus, Striwavirus, Subclovsatellite, Sugarlandvirus, Suipoxvirus, Sunshinevirus, Suspvirus, Svunavirus, Synodonvirus, Tabernariusvirus, Tankvirus, Tapwovirus, Taupapillomavirus, Tegunavirus, Tenuivirus, Tepovirus, Tequatrovirus, Tequintavirus, Teschovirus, Teseptimavirus, Tetraparvovirus, Thamnovirus, Thetaarterivirus, Thetapapillomavirus, Thetatorquevirus, Thogotovirus, Thornevirus, Thottimvirus, Tibrovirus, Tidunavirus, Tijeunavirus, Tilapinevirus, Timquatrovirus, Tinduovirus, Tiruvirus, Titanvirus, Tlsvirus, Tobamovirus, Tobravirus, Tombusvirus, Topocuvirus, Torchivirus, Torovirus, Torradovirus, Tortellinivirus, Totivirus, Tottorivirus, Toursvirus, Traversvirus, Treisdeltapapillomavirus, Treisepsilonpapillomavirus, Treisetapapillomavirus, Treisiotapapillomavirus, Treiskappapapillomavirus, Treisthetapapillomavirus, Treiszetapapillomavirus, Tremovirus, Triatovirus, Triavirus, Trichomonasvirus, Trichovirus, Trigintaduovirus, Trinavirus, Trippvirus, Tritimovirus, Tsarbombavirus, Tulanevirus, Tunavirus, Tungrovirus, Tupavirus, Turncurtovirus, Turrinivirus, Twortvirus, Tymovirus, Uetakevirus, Umbravirus, Unahavirus, Unaquatrovirus, Upsilonpapillomavirus, Valovirus, Varicellovirus, Varicosavirus, Vegasvirus, Velarivirus, Vendettavirus, Vequintavirus, Vesiculovirus, Vesivirus, Vespertiliovirus, Vhmlvirus, Vhulanivirus, Vicosavirus, Victorivirus, Vidavervirus, Vidquintavirus, Vieuvirus, Virtovirus, Vitivirus, Viunavirus, Vividuovirus, Waikavirus, Wamavirus, Wbetavirus, Weaselvirus, Webervirus, Wenrivirus, Whispovirus, Wildcatvirus, Wilnyevirus, Winklervirus, Wizardvirus, Woesvirus, Woodruffvirus, Wphvirus, Wubeivirus, Wuhivirus, Wumivirus, Xiamenvirus, Xipapillomavirus, Xipdecavirus, Yatapoxvirus, Yingvirus, Yokohamavirus, Yuavirus, Yuyuevirus, Yvonnevirus, Zeavirus, Zetaarterivirus, Zetapapillomavirus, Zetatorquevirus, Zindervirus, or Zybavirus.

[0102] In some embodiments, the genetically modified cell, tissue, organ, or non-human mammal exhibits enhanced resistance to viral infection caused by virus from at least one strain of virus. In some embodiments, the viral infection is caused by viruses from at least two strains of virus. In some embodiments, the viral infection is caused by viruses from at least three strains of virus. In some embodiments, the viral infection is caused by viruses from 1, 2, 3, 4, 5, 6, 7, 8, 9, 10, or more of strains of virus. Non-limiting examples of strain of virus can include African swine fever virus (ASFV), classical swine fever virus, foot and mouth disease virus, Hepatitis E virus, Influenza virus, Influenza A virus, parainfluenza, porcine circovirus, porcine reproductive and respiratory syndrome virus (PRRSV), transmissible gastroenteritis virus (TGEV), suid herpesvirus 1, vesicular stomatitis virus (VSV), Nipah virus, enterovirus, swine vesicular disease virus, Japanese B encephalitis, herpes virus, torque teno virus (TTV1 and TTV2), paramyxovirus, Ebola Reston virus, porcine hemagglutinating encephalomyelitis virus (PHEV), cytomegalovirus, Rabies lyssavirus, swine vesicular exanthema virus, pestiviruses, bovine viral diarrhoea virus, encephalomyocarditis virus, porcine epidemic diarrhea virus, Rotavirus, Teschen virus, porcine, pseudorabies virus, Getah virus, Menangle virus, porcine sapelovirus, porcine rubulavirus, Seneca Valley virus, porcine parvovirus, porcine deltacoronavirus, porcine parainfluenza 1 virus, atypical swine pestivirus, Influenza C virus, porcine respiratory coronavirus, encephalomyocarditis virus, porcine adenovirus, porcine kobuvirus, orthoreovirus, Sendai virus, porcine cytomegalovirus, porcine sapovirus, Chikungunya virus, porcine bocavirus, porcine astrovirus, swine pox virus, porcine torovirus, or swine papillomavirus. In some embodiments, the genetically modified cell, tissue, organ, or non-human mammal exhibits enhanced resistance to viral infection caused by PRRSV. In some embodiments, the genetically modified cell, tissue, organ, or non-human mammal exhibits enhanced resistance to viral infection caused by ASFV. In some embodiments, the genetically modified cell, tissue, organ, or non-human mammal exhibits enhanced resistance to viral infection caused by TGEV. In some embodiments, the genetically modified cell, tissue, organ, or non-human mammal exhibits enhanced resistance to viral infections caused by PRRSV, ASFV, and TGEV. In some embodiments, the genetically modified cell, tissue, organ, or non-human mammal exhibits enhanced resistance to viral infections caused by PRRSV and ASFV. In some embodiments, the genetically modified cell, tissue, organ, or non-human mammal exhibits enhanced resistance to viral infections caused by PRRSV and TGEV. In some embodiments, the genetically modified cell, tissue, organ, or non-human mammal exhibits enhanced resistance to viral infections caused by ASFV and TGEV.

[0103] In some embodiments, the genetically modified cell, tissue, organ, or non-human mammal exhibits enhanced resistance to viral infection caused by at least one strain of virus. In some embodiments, the genetically modified cell, tissue, organ, or non-human mammal comprising CD163 knockout, ANPEP knockout, GGTA1 knockout, CMAH knockout, and B4GALNT2 knockout exhibits enhanced resistance to viral infections caused by PRRSV, TGEV, and ASFV. In some embodiments, the genetically modified cell, tissue, organ, or non-human mammal comprising CD163 knockout, ANPEP knockout, and RELA knockin exhibits enhanced resistance to viral infections caused by PRRSV, TGEV, and ASFV. In some embodiments, the genetically modified cell, tissue, organ, or non-human mammal comprising CD163 knockout exhibits enhanced resistance to viral infection caused by PRRSV. In some embodiments, the genetically modified cell, tissue, organ, or non-human mammal comprising CD163 knockout exhibits enhanced resistance to viral infection caused by ASFV. In some embodiments, the genetically modified cell, tissue, organ, or non-human mammal comprising CD163 knockout exhibits enhanced resistance to viral infections caused by PRRSV and ASFV. In some embodiments, the genetically modified cell, tissue, organ, or non-human mammal comprising CD163 knockout and ANPEP knock exhibits enhanced resistance to viral infections caused by PRRSV and TGEV. In some embodiments, the genetically modified cell, tissue, organ, or non-human mammal comprising CD163 knockout and ANPEP knock exhibits enhanced resistance to viral infections caused by ASFV and TGEV. In some embodiments, the genetically modified cell, tissue, organ, or non-human mammal comprising CD163 knockout and ANPEP knock exhibits enhanced resistance to viral infections caused by PRRSV, ASFV, and TGEV. In some embodiments, the genetically modified cell, tissue, organ, or non-human mammal comprising CD163 knockout, GGTA1 knockout, CMAH knockout, and B4GALNT2 knockout exhibits enhanced resistance to viral infections caused by PRRSV and ASFV. In some embodiments, the genetically modified cell, tissue, organ, or non-human mammal comprising CD163 knockout and RELA knockin exhibits enhanced resistance to PRRSV and ASFV. In some embodiments, the genetically modified cell, tissue, organ, or non-human mammal comprising ANPEP knockout, GGTA1 knockout, CMAH knockout, and B4GALNT2 knockout exhibits enhanced resistance to viral infections caused by TGEV and ASFV. In some embodiments, the genetically modified cell, tissue, organ, or non-human mammal comprising ANPEP knockout and RELA knockin exhibits enhanced resistance to viral infections caused by TGEV and ASFV.

[0104] In some embodiments, the genetically modified pig comprising CD163 knockout, ANPEP knockout, GGTA1 knockout, CMAH knockout, and B4GALNT2 knockout exhibits enhanced resistance to viral infections caused by PRRSV, TGEV, and ASFV. In some embodiments, the genetically modified pig comprising CD163 knockout, ANPEP knockout, and RELA knockin exhibits enhanced resistance to viral infections caused by PRRSV, TGEV, and ASFV. In some embodiments, the genetically modified pig comprising CD163 knockout exhibits enhanced resistance to viral infection caused by PRRSV. In some embodiments, the genetically modified pig comprising CD163 knockout exhibits enhanced resistance to viral infection caused by ASFV. In some embodiments, the genetically modified pig comprising CD163 knockout exhibits enhanced resistance to viral infections caused by PRRSV and ASFV. In some embodiments, the genetically modified pig comprising CD163 knockout and ANPEP knockout exhibits enhanced resistance to viral infection caused by PRRSV and TGEV. In some embodiments, the genetically modified pig comprising CD163 knockout and ANPEP knockout exhibits enhanced resistance to viral infection caused by ASFV and TGEV. In some embodiments, the genetically modified pig comprising CD163 knockout and ANPEP knockout exhibits enhanced resistance to viral infection caused by PRRSV, ASFV, and TGEV. In some embodiments, the genetically pig comprising CD163 knockout, GGTA1 knockout, CMAH knockout, and B4GALNT2 knockout exhibits enhanced resistance to viral infections caused by PRRSV and ASFV. In some embodiments, the genetically modified pig comprising CD163 knockout and RELA knockin exhibits enhanced resistance to PRRSV and ASFV. In some embodiments, the genetically modified pig comprising ANPEP knockout, GGTA1 knockout, CMAH knockout, and B4GALNT2 knockout exhibits enhanced resistance to viral infections caused by TGEV and ASFV. In some embodiments, the genetically pig comprising ANPEP knockout and RELA knockin exhibits enhanced resistance to viral infections caused by TGEV and ASFV.

### Composition for Modifying Endogenous Genes

[0105] Described herein, in some embodiments, are compositions for modifying one or more of the endogenous genes. Also described herein, in some embodiments, is composition for targeting and cleaving one or more endogenous genes or transcripts of the one or more endogenous genes described herein. In some embodiments, the composition can reduce or inhibit expression of one or more of the endogenous genes described herein. Also described herein, in some embodiments, is composition for targeting and cleaving viral genomes, viral genes, or transcripts of the viral genomes and viral genes. In some embodiments, the composition reduces or inhibits expression of the viral genomes or viral genes. In some embodiments, the viral genomes, viral genes, or viral transcripts being targeted, cleaved, or degraded is deoxyribonucleic acid (DNA). In some cases, the DNA is single-stranded or doubled-stranded. In some embodiments, the viral genomes, viral genes, or the transcripts of the viral genomes and viral genes targeted, cleaved, or degraded is ribonucleic acid (RNA). In some instances, the RNA is mRNA, rRNA, SRP RNA, tRNA, tmRNA, snRNA, snoRNA, gRNA, aRNA, crRNA, lncRNA, miRNA, ncRNA, piRNA, siRNA, or shRNA. In some embodiments, the target RNA is an mRNA.

[0106] In some embodiments, the composition described herein can target and bind to at least a locus of the target genomes, genes, or transcripts. In some embodiments, the composition can modify chromosomal sequence of the one or more endogenous genes by point mutation, insertion, deletion, frameshift, translocation, duplication, inversion, non-homologous end joining (NHEJ), homology directed repair (HDR), inactivation, disruption, excision of a portion, or a combination thereof. In some embodiments, the composition described herein can target and bind to at least a locus of the target genomes, genes, or transcripts for cleavage or degradation. In some embodiments, the locus of the chromosomal sequences of the endogenous genes, viral genomes, or viral genes being targeted and bound by the compositions and methods described herein is between 5 nt to 100 nt. In some embodiments, the locus of the genomes, genes, or transcripts being targeted and bound by the compositions and methods described herein is between 5 nucleotides (nt) to 10 nt, 5 nt to 15 nt, 5 nt to 20 nt, 5 nt to 25 nt, 5 nt to 30 nt, 5 nt to 40 nt, 5 nt to 50 nt, 5 nt to 60 nt, 5 nt to 70 nt, 5 nt to 80 nt, 5 nt to 100 nt, 10 nt to 15 nt, 10 nt to 20 nt, 10 nt to 25 nt, 10 nt to 30 nt, 10 nt to 40 nt, 10 nt to 50 nt, 10 nt to 60 nt, 10 nt to 70 nt, 10 nt to 80 nt, 10 nt to 100 nt, 15 nt to 20 nt, 15 nt to 25 nt, 15 nt to 30 nt, 15 nt to 40 nt, 15 nt to 50 nt, 15 nt to 60 nt, 15 nt to 70 nt, 15 nt to 80 nt, 15 nt to 100 nt, 20 nt to 25 nt, 20 nt to 30 nt, 20 nt to 40 nt, 20 nt to 50 nt, 20 nt to 60 nt, 20 nt to 70 nt, 20 nt to 80 nt, 20 nt to 100 nt, 25 nt to 30 nt, 25 nt to 40 nt, 25 nt to 50 nt, 25 nt to 60 nt, 25 nt to 70 nt, 25 nt to 80 nt, 25 nt to 100 nt, 30 nt to 40 nt, 30 nt to 50 nt, 30 nt to 60 nt, 30 nt to 70 nt, 30 nt to 80 nt, 30 nt to 100 nt, 40 nt to 50 nt, 40 nt to 60 nt, 40 nt to 70 nt, 40 nt to 80 nt, 40 nt to 100 nt, 50 nt to 60 nt, 50 nt to 70 nt, 50 nt to 80 nt, 50 nt to 100 nt, 60 nt to 70 nt, 60 nt to 80 nt, 60 nt to 100 nt, 70 nt to 80 nt, 70 nt to 100 nt, or 80 nt to 100 nt. In some embodiments, the locus of the genomes, genes, or transcripts being targeted and bound by the compositions and methods described herein comprises at least about 5 nt, 10 nt, 15 nt, 20 nt, 25 nt, 30 nt, 40 nt, 50 nt, 60 nt, 70 nt, 80 nt, 100 nt, or more. In some embodiments, the locus of the viral genomes or viral genes being targeted and bound by the compositions and methods described herein comprises about 5 nt, 10 nt, 15 nt, 20 nt, 25 nt, 30 nt, 40 nt, 50 nt, 60 nt, 70 nt, or 80 nt. In some embodiments, the locus of the viral genomes or viral genes being targeted and bound by the compositions and methods described herein comprises at most about 100 nt, 90 nt, 80 nt, 70 nt, 60 nt, 50 nt, 40 nt, 30 nt, 25 nt, 20 nt, 15 nt, 10 nt, 5 nt, or fewer.

[0107] In some embodiments, the composition comprises at least one heterologous polypeptide. In some instances, the heterologous polypeptide comprises at least one gene regulating moiety to regulate the expression of one or more endogenous genes. In some embodiments, the composition described herein comprises gene regulating moiety to regulate the expression of one or more viral genomes or viral genes. In some embodiments, the gene regulating moiety comprises a CRISPR-Cas polypeptide. In some embodiments, the gene regulating moiety can be, for example, Class 1 CRISPR-associated (Cas) polypeptides, Class 2 Cas polypeptides, type I Cas polypeptides, type II Cas polypeptides, type III Cas polypeptides, type IV Cas polypeptides, type V Cas polypeptides, type VI Cas polypeptide, CRISPR-associated RNA binding proteins, or a functional fragment thereof. Cas polypeptides suitable for use with the present disclosure can include Cas9, Cas12, Cas13, Cpf1 (or Cas12a), C2C1, C2C2 (or Cas13a), Cas13b, Cas13c, Cas13d, C2C3, Cas1, Cas1B, Cas2, Cas3, Cas4, Cas5, Cas5e (CasD), Cas6, Cas6e, Cas6f, Cas7, Cas8a, Cas8a1, Cas8a2, Cas8b, Cas8c, Csn1, Csx12, Cas10, Cas10d, Cas10, Cas10d, CasF, CasG, CasH, Csy1, Csy2, Csy3, Cse1 (CasA), Cse2 (CasB), Cse3 (CasE), Cse4 (CasC), Csc1, Csc2, Csa5, Csn2, Csm2, Csm3, Csm4, Csm5, Csm6, Cmr1, Cmr3, Cmr4, Cmr5, Cmr6, Csb1, Csb2, Csb3, Csx17, Csx14, Csx10, Csx16, CsaX, Csx3, Csx1, Csx15, Csf1, Csf2, Csf3, Csf4, or Cul966; any derivative thereof, any variant thereof; or any fragment thereof. In some embodiments, Cas13 can include, but are not limited to, Cas13a, Cas13b, Cas13c, and Cas 13d (e.g., CasRx). The CRISPR/Cas can be DNA and/or RNA cleaving, or can exhibit reduced cleavage activity. The gene regulating moiety can be configured to complex with at least one heterologous RNA polynucleotide. The gene regulating moiety can be configured to complex with at least one guide nucleic acid. The gene regulating moiety can be configured to complex with at least one guide nucleic acid to target and cleave transcripts of one or more of the endogenous genes described herein. The gene regulating moiety can be configured to complex with at least one guide nucleic acid to target and cleave transcripts of one or more of viral genomes or viral genes described herein In some cases, the gene regulating moiety can be fused with a transcription activator or transcription repressor.

[0108] Any suitable nuclease (e.g., endonuclease) can be used in as the gene regulating moiety. Suitable nucleases include, but are not limited to, CRISPR-associated (Cas) proteins or Cas nucleases including type I CRISPR-associated (Cas) polypeptides, type II CRISPR-associated (Cas) polypeptides, type III CRISPR-associated (Cas) polypeptides, type IV CRISPR-associated (Cas) polypeptides, type V CRISPR-associated (Cas) polypeptides, and type VI CRISPR-associated (Cas) polypeptides; zinc finger nucleases (ZFN); transcription activator-like effector nucleases (TALEN); meganucleases; RNA-binding proteins (RBP); CRISPR-associated RNA binding proteins; recombinases; flippases; transposases; Argonaute (Ago) proteins (e.g., prokaryotic Argonaute (pAgo), archaeal Argonaute (aAgo), eukaryotic Argonaute (eAgo), and Natronobacterium gregoryi Argonaute (NgAgo)); Adenosine deaminases acting on RNA (ADAR); CIRT, PUF, homing endonuclease, or any functional fragment thereof, any derivative thereof, any variant thereof; and any fragment thereof.

[0109] In some embodiments, the nucleic acid-guided nuclease disclosed herein can be a deactivated nuclease that lacks nucleic acid cleavage activity. In some cases, a Cas protein can be a dead Cas protein. A dead Cas protein can be a protein that lacks nucleic acid cleavage activity. A Cas protein can comprise a modified form of a wild type Cas protein. The modified form of the wild type Cas protein can comprise an amino acid change (e.g., deletion, insertion, or substitution) that reduces the nucleic acid-cleaving activity of the Cas protein. For example, the modified form of the Cas protein can have less than 90%, less than 80%, less than 70%, less than 60%, less than 50%, less than 40%, less than 30%, less than 20%, less than 10%, less than 5%, or less than 1% of the nucleic acid-cleaving activity of the wild-type Cas protein (e.g., Cas9 from S. pyogenes). The modified form of Cas protein can have no substantial nucleic acid-cleaving activity. When a Cas protein is a modified form that has no substantial nucleic acid-cleaving activity, it can be referred to as enzymatically inactive and/or “dead” (abbreviated by “d”). A dead Cas protein (e.g., dCas, dCas9) can bind to a target polynucleotide but may not cleave the target polynucleotide. In some aspects, a dead Cas protein can be a dead Cas9 protein.

[0110] In some embodiments, a dCas (e.g., dCas9) polypeptide can associate with a single guide RNA (sgRNA) to activate or repress transcription of target DNA. sgRNAs can be introduced into cells expressing the engineered chimeric receptor polypeptide. In some cases, such cells contain one or more different sgRNAs that target the same nucleic acid. In other cases, the sgRNAs target different nucleic acids in the cell.

[0111] In some embodiments, the gene regulating moiety can comprise a catalytically inactive Cas polypeptide, where the nuclease activity of the Cas polypeptide is eliminated or substantially eliminated.

[0112] In some instances, the gene regulating moiety can comprise a catalytically inactivated Cas9 (dCas9), any derivative thereof, any variant thereof, or any fragment thereof.

[0113] In some instances, the gene regulating moiety can comprise a catalytically inactivated Cas12 (dCas12), any derivative thereof, any variant thereof, or any fragment thereof.

[0114] In some instances, the gene regulating moiety can comprise a catalytically inactivated Cas13 (dCas13), any derivative thereof, any variant thereof, or any fragment thereof.

[0115] A gene regulating moiety as disclosed herein can be coupled (e.g., linked or fused) to additional peptide sequences which are not involved in regulating gene expression, for example linker sequences, targeting sequences, etc. The term “targeting sequence,” as used herein, refers to a nucleotide sequence and the corresponding amino acid sequence which encodes a targeting polypeptide which mediates the localization (or retention) of a protein to a sub-cellular location, e.g., plasma membrane or membrane of a given organelle, nucleus, cytosol, mitochondria, endoplasmic reticulum (ER), Golgi, chloroplast, apoplast, peroxisome or other organelle. For example, a targeting sequence can direct a protein (e.g., a receptor polypeptide or an adaptor polypeptide) to a nucleus utilizing a nuclear localization signal (NLS); outside of a nucleus of a cell, for example to the cytoplasm, utilizing a nuclear export signal (NES); mitochondria utilizing a mitochondrial targeting signal; the endoplasmic reticulum (ER) utilizing an ER-retention signal; a peroxisome utilizing a peroxisomal targeting signal; plasma membrane utilizing a membrane localization signal; or combinations thereof.

[0116] A gene regulating moiety as disclosed herein can be a part of a fusion construct (e.g., a fusion protein). As used herein, “fusion” can refer to a protein and/or nucleic acid comprising one or more non-native sequences (e.g., moieties). A fusion can comprise one or more of the same non-native sequences. A fusion can comprise one or more of different non-native sequences. A fusion can be a chimera. A fusion can comprise a nucleic acid affinity tag. A fusion can comprise a barcode. A fusion can comprise a peptide affinity tag. A fusion can provide for subcellular localization of the site-directed polypeptide (e.g., a nuclear localization signal (NLS) for targeting to the nucleus, a mitochondrial localization signal for targeting to the mitochondria, a chloroplast localization signal for targeting to a chloroplast, an endoplasmic reticulum (ER) retention signal, and the like). A fusion can provide a non-native sequence (e.g., affinity tag) that can be used to track or purify. A fusion can be a small molecule such as biotin or a dye such as Alexa fluor dyes, Cyanine3 dye, Cyanine5 dye.

[0117] A fusion can refer to any protein with a functional effect. For example, a fusion protein can comprise methyltransferase activity, demethylase activity, dismutase activity, alkylation activity, depurination activity, oxidation activity, pyrimidine dimer forming activity, integrase activity, transposase activity, recombinase activity, polymerase activity (e.g., a reverse transcriptase activity), ligase activity, helicase activity, photolyase activity or glycosylase activity, acetyltransferase activity, deacetylase activity, kinase activity, phosphatase activity, ubiquitin ligase activity, deubiquitinating activity, adenylation activity, deadenylation activity, SUMOylating activity, deSUMOylating activity, ribosylation activity, deribosylation activity, myristoylation activity, remodelling activity, protease activity, oxidoreductase activity, transferase activity, hydrolase activity, lyase activity, isomerase activity, synthase activity, synthetase activity, or demyristoylation activity. An effector protein can modify a genomic locus. A fusion protein can be a fusion in a Cas protein. A fusion protein can be a non-native sequence in a Cas protein.

[0118] In some embodiments, the gene regulating moiety can be fused to one or more transcription repressor domains, activator domains, epigenetic domains, recombinase domains, transposase domains, flippase domains, nickase domains, or any combination thereof. The activator domain can include one or more tandem activation domains located at the carboxyl terminus of the protein. In some cases, the gene regulating moiety includes one or more tandem repressor domains located at the carboxyl terminus of the protein. Non-limiting exemplary activation domains include GAL4, herpes simplex activation domain VP16, VP64 (a tetramer of the herpes simplex activation domain VP16), NF-κB p65 subunit, Epstein-Barr virus R transactivator (Rta) and are described in Chavez et al., Nat Methods, 2015, 12(4):326-328 and U.S. Patent App. Publ. No. 20140068797. Non-limiting exemplary repression domains include the KRAB (Kruppel-associated box) domain of KoxI, the Mad mSIN3 interaction domain (SID), ERF repressor domain (ERD), and are described in Chavez et al., Nat Methods, 2015, 12(4):326-328 and U.S. Patent App. Publ. No. 20140068797. In some embodiments, the gene regulating moiety includes one or more tandem repressor domains located at the amino terminus of the protein. In some embodiments, the gene regulating moiety can reduce or inhibit expression of one or more of the endogenous genes described herein.

[0119] Described herein, in some embodiments, is a composition comprising at least one heterologous polynucleotide. In some embodiments, the gene regulating moiety can be complexed with the at least one heterologous polynucleotide as described herein. In some embodiments, the at least one heterologous polynucleotide can be either heterologous DNA polynucleotide or heterologous RNA polynucleotide. In some embodiments, the at least one heterologous polynucleotide can encode at least one guide nucleic acid. In some embodiments, the at least one heterologous polynucleotide can encode at least one, two, three, four, five, six, or more guide nucleic acids. In some embodiments, the gene regulating moiety can be complexed with at least one guide nucleic acid. In some embodiments, the at least one guide nucleic acid can bind to at least a locus of the viral genomes, viral genes, or transcripts of the viral genomes and viral genes. In some cases, the at least one guide nucleic acid is capable forming a complex with the gene regulating moiety to direct the gene regulating moiety to target the locus of the viral genomes, viral genes, or transcripts of the viral genomes and viral genes. In some embodiments, the at least one guide nucleic acid is capable forming a complex with the gene regulating moiety to direct the gene regulating moiety to target the locus of the viral genomes, viral genes, or transcripts of the viral genomes and viral genes for cleavage or degradation. In some instances, the at least one guide nucleic acid is capable forming a complex with the gene regulating moiety to direct the gene regulating moiety to reduce or inhibit expression of the targeted locus of the viral genomes or viral genes.

[0120] In some cases, the complexing with the at least one guide nucleic acid can direct and target the gene regulating moiety to the locus of the endogenous genes, transcripts of endogenous genes, viral genomes, viral genes, or transcripts of the viral genomes or viral genes. In some cases, the complexing with the at least one guide nucleic acid can direct and target the gene regulating moiety to the locus of the endogenous genes, transcript of endogenous genes, viral genomes, viral genes, or transcript of the viral genomes or viral genes targeted for cleavage or degradation. In some cases, the complexing with the at least one guide nucleic acid can direct and target the gene regulating moiety to the locus of the endogenous genes, transcript of endogenous gene, viral genomes, viral genes, or transcripts of the viral genomes or viral genes, where the gene regulating moiety reduces or inhibits expression of the endogenous gene, viral genomes or viral genes in the genetically modified cell.

[0121] In some embodiments, at least one guide nucleic acid can be complexed with the gene regulating moiety. In some embodiments, at least two guide nucleic acids can be complexed with the gene regulating moiety. In some embodiments, at least three guide nucleic acids can be complexed with the gene regulating moiety. In some embodiments, at least four guide nucleic acids can be complexed with the gene regulating moiety. In some embodiments, at least five guide nucleic acids can be complexed with the gene regulating moiety. In some embodiments, at least six guide nucleic acids can be complexed with the gene regulating moiety.

[0122] In some embodiments, the gene regulating moiety can reduce or inhibit expression of one or more endogenous genes described herein. In some instances, the gene regulating moiety can reduce or inhibit expression of viral genomes or viral genes described herein. In some embodiments, the gene regulating moiety can reduce the expression of the viral genomes or viral genes between about 0.1 fold to about 10,000 fold. In some embodiments, the gene regulating moiety can reduce the expression of the viral genomes or viral genes between about 0.1 fold to about 0.2 fold, about 0.1 fold to about 0.5 fold, about 0.1 fold to about 1 fold, about 0.1 fold to about 2 fold, about 0.1 fold to about 5 fold, about 0.1 fold to about 10 fold, about 0.1 fold to about 20 fold, about 0.1 fold to about 50 fold, about 0.1 fold to about 100 fold, about 0.1 fold to about 1,000 fold, about 0.1 fold to about 10,000 fold, about 0.2 fold to about 0.5 fold, about 0.2 fold to about 1 fold, about 0.2 fold to about 2 fold, about 0.2 fold to about 5 fold, about 0.2 fold to about 10 fold, about 0.2 fold to about 20 fold, about 0.2 fold to about 50 fold, about 0.2 fold to about 100 fold, about 0.2 fold to about 1,000 fold, about 0.2 fold to about 10,000 fold, about 0.5 fold to about 1 fold, about 0.5 fold to about 2 fold, about 0.5 fold to about 5 fold, about 0.5 fold to about 10 fold, about 0.5 fold to about 20 fold, about 0.5 fold to about 50 fold, about 0.5 fold to about 100 fold, about 0.5 fold to about 1,000 fold, about 0.5 fold to about 10,000 fold, about 1 fold to about 2 fold, about 1 fold to about 5 fold, about 1 fold to about 10 fold, about 1 fold to about 20 fold, about 1 fold to about 50 fold, about 1 fold to about 100 fold, about 1 fold to about 1,000 fold, about 1 fold to about 10,000 fold, about 2 fold to about 5 fold, about 2 fold to about 10 fold, about 2 fold to about 20 fold, about 2 fold to about 50 fold, about 2 fold to about 100 fold, about 2 fold to about 1,000 fold, about 2 fold to about 10,000 fold, about 5 fold to about 10 fold, about 5 fold to about 20 fold, about 5 fold to about 50 fold, about 5 fold to about 100 fold, about 5 fold to about 1,000 fold, about 5 fold to about 10,000 fold, about 10 fold to about 20 fold, about 10 fold to about 50 fold, about 10 fold to about 100 fold, about 10 fold to about 1,000 fold, about 10 fold to about 10,000 fold, about 20 fold to about 50 fold, about 20 fold to about 100 fold, about 20 fold to about 1,000 fold, about 20 fold to about 10,000 fold, about 50 fold to about 100 fold, about 50 fold to about 1,000 fold, about 50 fold to about 10,000 fold, about 100 fold to about 1,000 fold, about 100 fold to about 10,000 fold, or about 1,000 fold to about 10,000 fold. In some embodiments, the gene regulating moiety can reduce the expression of the viral genomes or viral genes between about 0.1 fold, about 0.2 fold, about 0.5 fold, about 1 fold, about 2 fold, about 5 fold, about 10 fold, about 20 fold, about 50 fold, about 100 fold, about 1,000 fold, or about 10,000 fold. In some embodiments, the gene regulating moiety can reduce the expression of the viral genomes or viral genes between at least about 0.1 fold, about 0.2 fold, about 0.5 fold, about 1 fold, about 2 fold, about 5 fold, about 10 fold, about 20 fold, about 50 fold, about 100 fold, or about 1,000 fold. In some embodiments, the gene regulating moiety can reduce the expression of the viral genomes or viral genes between at most about 0.2 fold, about 0.5 fold, about 1 fold, about 2 fold, about 5 fold, about 10 fold, about 20 fold, about 50 fold, about 100 fold, about 1,000 fold, or about 10,000 fold.

[0123] In some cases, the composition described herein comprises at least one heterologous polynucleotide. In some cases, the composition described herein comprises a plurality of heterologous polynucleotides. In some embodiments, the polynucleotide is deoxyribonucleic acid (DNA). In some cases, the DNA sequence is single-stranded or doubled-stranded. In some embodiments, the at least one heterologous polynucleotide is ribonucleic acid (RNA).

[0124] In some embodiments, the gene regulating moiety is complexed with the at least one heterologous polynucleotide. In some embodiments, the gene regulating moiety is complexed with at least one guide nucleic acid encoded by the heterologous polynucleotide. The at least one heterologous RNA polynucleotide or the guide nucleic acid can comprise a nucleic-acid targeting region that comprises a complementary sequence to a nucleic acid sequence on the targeted polynucleotide such as the targeted endogenous genes, targeted viral genomes, targeted viral genes, or targeted transcripts of the viral genomes or viral genes to confer the sequence specificity of gene regulating moiety-dependent targeting. In some embodiments, the at least one heterologous RNA polynucleotide is guide nucleic acid (or guide RNA) comprising two separate nucleic acid molecules, which is referred to as a double guide nucleic acid or a single nucleic acid molecule, which is referred to as a single guide nucleic acid (e.g., sgRNA). In some embodiments, the guide nucleic acid is a single guide nucleic acid comprising a fused CRISPR RNA (crRNA) and a transactivating crRNA (tracrRNA). In some embodiments, the guide nucleic acid is a single guide nucleic acid comprising a crRNA. In some embodiments, the guide nucleic acid is a single guide nucleic acid comprising a crRNA but lacking a tracRNA. In some embodiments, the guide nucleic acid is a double guide nucleic acid comprising non-fused crRNA and tracrRNA. An exemplary double guide nucleic acid can comprise a crRNA-like molecule and a tracrRNA-like molecule. An exemplary single guide nucleic acid can comprise a crRNA-like molecule. An exemplary single guide nucleic acid can comprise a fused crRNA-like molecule and a tracrRNA-like molecule.

[0125] A crRNA can comprise the nucleic acid-targeting segment (e.g., spacer region) of the guide nucleic acid and a stretch of nucleotides that can form one half of a double-stranded duplex of the Cas protein-binding segment of the guide nucleic acid.

[0126] A tracrRNA can comprise a stretch of nucleotides that forms the other half of the double-stranded duplex of the Cas protein-binding segment of the gRNA. A stretch of nucleotides of a crRNA can be complementary to and hybridize with a stretch of nucleotides of a tracrRNA to form the double-stranded duplex of the Cas protein-binding domain of the guide nucleic acid.

[0127] The crRNA and tracrRNA can hybridize to form a guide nucleic acid (e.g. a gRNA). The crRNA can also provide a single-stranded nucleic acid targeting segment (e.g., a spacer region) that hybridizes to a target nucleic acid recognition sequence (e.g., protospacer). The sequence of a crRNA, including spacer region, or tracrRNA molecule can be designed to be specific to the species in which the guide nucleic acid is to be used.

[0128] In some embodiments, the nucleic acid-targeting region of a guide nucleic acid can be between 18 to 72 nucleotides in length. The nucleic acid-targeting region of a guide nucleic acid (e.g., spacer region) can have a length of from about 12 nucleotides to about 100 nucleotides. For example, the nucleic acid-targeting region of a guide nucleic acid (e.g., spacer region) can have a length of from about 12 nucleotides (nt) to about 80 nt, from about 12 nt to about 50 nt, from about 12 nt to about 40 nt, from about 12 nt to about 30 nt, from about 12 nt to about 25 nt, from about 12 nt to about 20 nt, from about 12 nt to about 19 nt, from about 12 nt to about 18 nt, from about 12 nt to about 17 nt, from about 12 nt to about 16 nt, or from about 12 nt to about 15 nt. Alternatively, the DNA-targeting segment can have a length of from about 18 nt to about 20 nt, from about 18 nt to about 25 nt, from about 18 nt to about 30 nt, from about 18 nt to about 35 nt, from about 18 nt to about 40 nt, from about 18 nt to about 45 nt, from about 18 nt to about 50 nt, from about 18 nt to about 60 nt, from about 18 nt to about 70 nt, from about 18 nt to about 80 nt, from about 18 nt to about 90 nt, from about 18 nt to about 100 nt, from about 20 nt to about 25 nt, from about 20 nt to about 30 nt, from about 20 nt to about 35 nt, from about 20 nt to about 40 nt, from about 20 nt to about 45 nt, from about 20 nt to about 50 nt, from about 20 nt to about 60 nt, from about 20 nt to about 70 nt, from about 20 nt to about 80 nt, from about 20 nt to about 90 nt, or from about 20 nt to about 100 nt. The length of the nucleic acid-targeting region can be at least 5, 10, 15, 16, 17, 18, 19, 20, 21, 22, 23, 24, 25, 30 or more nucleotides. The length of the nucleic acid-targeting region (e.g., spacer sequence) can be at most 5, 10, 15, 16, 17, 18, 19, 20, 21, 22, 23, 24, 25, 30 or more nucleotides.

[0129] In some embodiments, the nucleic acid-targeting region of a guide nucleic acid (e.g., spacer) is 20 nucleotides in length. In some embodiments, the nucleic acid-targeting region of a guide nucleic acid is 19 nucleotides in length. In some embodiments, the nucleic acid-targeting region of a guide nucleic acid is 18 nucleotides in length. In some embodiments, the nucleic acid-targeting region of a guide nucleic acid is 17 nucleotides in length. In some embodiments, the nucleic acid-targeting region of a guide nucleic acid is 16 nucleotides in length. In some embodiments, the nucleic acid-targeting region of a guide nucleic acid is 21 nucleotides in length. In some embodiments, the nucleic acid-targeting region of a guide nucleic acid is 22 nucleotides in length.

[0130] The nucleotide sequence of the guide nucleic acid that is complementary to a nucleotide sequence (target sequence) of the target nucleic acid can have a length of, for example, at least about 12 nt, at least about 15 nt, at least about 18 nt, at least about 19 nt, at least about 20 nt, at least about 25 nt, at least about 30 nt, at least about 35 nt or at least about 40 nt. The nucleotide sequence of the guide nucleic acid that is complementary to a nucleotide sequence (target sequence) of the target nucleic acid can have a length of from about 12 nucleotides (nt) to about 80 nt, from about 12 nt to about 50 nt, from about 12 nt to about 45 nt, from about 12 nt to about 40 nt, from about 12 nt to about 35 nt, from about 12 nt to about 30 nt, from about 12 nt to about 25 nt, from about 12 nt to about 20 nt, from about 12 nt to about 19 nt, from about 19 nt to about 20 nt, from about 19 nt to about 25 nt, from about 19 nt to about 30 nt, from about 19 nt to about 35 nt, from about 19 nt to about 40 nt, from about 19 nt to about 45 nt, from about 19 nt to about 50 nt, from about 19 nt to about 60 nt, from about 20 nt to about 25 nt, from about 20 nt to about 30 nt, from about 20 nt to about 35 nt, from about 20 nt to about 40 nt, from about 20 nt to about 45 nt, from about 20 nt to about 50 nt, or from about 20 nt to about 60 nt.

[0131] In some embodiments, the compositions described herein comprise at least one guide nucleic acid (gRNA) to be complexed with the nucleic acid-guided nuclease described herein. In some embodiments, the composition comprises at least one, two, three, four, five, six, seven, eight, nine, 10, 11, 12, 13, 14, 15, 16, 17, 18, 19, 20, 30, 50, or more gRNAs. In some cases, the gRNAs can be multiplexed. For example, multiple gRNAs can be assembled into a vector and under the transcription control of a promoter. In some cases, the gRNAs can be flanked by self-cleaving ribozymes. A gRNA sequence can be flanked by a self-cleaving Hammerhead ribozyme at the 5′ end of the gRNA sequence and by a self-cleaving HDV ribozyme at the 3′ end of the gRNA sequence. The 5′ and 3′ end ribozymes self-cleave to generate the mature gRNA, which can be complexed with a nucleic acid-guided nuclease and can direct the nucleic acid-guided nuclease to a targeted nucleic acid sequence. FIG. 4A illustrates an exemplary multiplexed vector design showing multiple gRNAs each individually flanked by ribozymes at the 5′ and 3′ ends of the gRNAs. The self-cleavage of the ribozymes can generate mature gRNAs.

[0132] In some cases, the expression of the gRNAs can be multiplexed with the expression of the at least one of the nucleic acid-guided nuclease described herein. In some cases, the multiplexing of the gRNAs and the nucleic acid-guided nuclease can be under the same or different promoters. As shown in FIG. 4B, a pBv1-EF vector depicts six gRNAs and a nucleic acid-guided nuclease (Cas9) under the transcription control of a human EF1α (hEF1α) promoter and a mouse EF1α (mEF1α) promoter respectively. FIG. 4B shows a pBv1-U6 vector with the expression of the six gRNAs under an U6 promoter, while the expression of the nucleic acid-guided nuclease (Cas9) is under the transcription control of the mEF1a promoter. In some cases, the promoter can be a cell-specific promoter (pBv1 of FIG. 4B). In some cases, the Cas9 expression is driven by the hEF1α promoter. In some instances, an U6 or a mEF1a promoter can drive the expression of any one of the gRNA described herein. In some cases, the nucleic acid-guided nuclease in these vectors can be fused to a nuclear localization sequence (NLS). In some cases, the nucleic acid-guided nuclease is without the tag and without NLS (e.g. pBv2-EF and pBv2-U6 vectors of FIG. 4B) to increase cytoplasmic localization for the nucleic acid-guided nuclease. In some cases, the vectors depicted in FIG. 4B can express Cas9 and any one of singular or plural of gRNAs described herein in a single vector. In some embodiments, the vector described herein can be inserted into the genome of a cell via the use of a Piggybac system. FIG. 4C illustrates exemplary backbone vectors and gRNA ribozyme designs, where the sequences of the ribozymes and Golden Gate junctions are shown. Similar to FIG. 4B, FIG. 4C illustrates vectors that can express cas9 and gRNA in a single vector. In some cases, the vectors of FIG. 4C can be introduced into the genome of a cell by use of a Piggybac system. In some cases, the vectors of FIG. 4C comprises hEF1α promoter to drive the Cas9 expression. In some cases, the vectors of FIG. 4C comprises U6 or mEF1a promoter to drive expression of any one of the gRNA described herein. In some instances, the vectors can be assembled by junction for Golden Gate Assembly. In some cases, the assembly of the vectors comprising multiplexed gRNAs via first by Gibson assembly for generating the backbone of the vectors followed by Golden Gate assembly to generate the vectors described herein. Each gRNA can be individually cloned into the vector. The final assembly can be done by type IS restriction enzymes assembling multiple DNA fragments in a linear order (e.g. assembly by type IIS restriction enzyme Bsal). The vectors can be delivered into a cell by any delivery system, including the use of s an artificial chromosome system such as delivering the vectors described herein into a cell with a bacterial artificial chromosome (BAC) comprising the PiggyBac Transposon elements. FIG. 5A illustrates the presence of the fragment of the Cas9 transgene construct (pBv1-U6) inserted at genomic DNA level in the cloned transgenic pigs. 100 ng of genomic DNA obtained from transgenic pigs P07, P09, P10, P11, and P13 all showed the amplification of the fragment of the transgene. WT: wild type large white pig genomic DNA. PC: positive control (plasmid carrying transgene). FIG. 5B illustrates expression of Cas9 transgene by RT-qPCR. Pig fibroblasts were harvested from cloned transgenic pigs, and RNA was isolated from the fibroblasts. Reverse transcription was carried out to obtain cDNA. PCR were performed using cDNA as template to identify proper expression of Cas9 transgene. 100 ng cDNA from transgenic pig fibroblast (P10 and P12) or from wild type pig fibroblast. Cas9 expression was detected by qPCR of cDNA from transgenic pig fibroblasts. FIG. 5C illustrates Cas9/sgRNA expression in the transgenic pig fibroblasts with active cutting ability using reporter plasmid detecting homology-directed repair (HDR). Reporter plasmid was used for reporting cutting of an ASFV sgRNA target site and generating a positive signal of EGFP (FITC channel) through homology-directed repair to reconstitute a functional EGFP copy. The use of the report plasmid can mimic the process of how ASFV can be cut after entering the cells of the transgenic pigs, confirming Cas9/sgRNA function of cutting dsDNA with ASFV sgRNA target site in the transgenic pig fibroblasts. HDR-reporter plasmid were transfected into fibroblasts of transgenic pigs P09 and P10. FACS were performed 48 hours after transfection to detect the expression of EGFP. Cas9/sgRNA proper cutting ability was detected in both P09 and P10 pig fibroblasts.

[0133] In some embodiments, the at least one guide nucleic acid is complementary and bind to viral genomes, viral genes, or transcripts of the viral genomes and viral genes of any one of the virus described herein. In some embodiments, the at least one guide nucleic acid is complementary and bind to viral genomes, viral genes, or transcripts of the viral genomes and viral genes of ASFV. In some embodiments, the at least one guide nucleic acid is complementary and bind to ASFV viral genome as depicted in SEQ ID NO: 6 and SEQ ID NO: 7 in Table 3. In some embodiments, the guide nucleic acid comprises a nucleic acid sequence of any one of SEQ ID NOS: 10001-13274, SEQ ID NOS: 20001-23274, and SEQ ID NOS: 30001-33274 (Table 4). In some embodiments, the guide nucleic acid comprises a nucleic acid sequence of any one of SEQ ID NOS: 10001, 10002, 10433, 10848, 12318, and 12266 (Table 5). In some embodiments, the guide nucleic acid comprises a nucleic acid sequence of any one of SEQ ID NOS: 20001, 20002, 20433, 20848, 22318, and 22266 (Table 5). In some embodiments, the guide nucleic acid comprises a nucleic acid sequence of any one of SEQ ID NOS: 30001, 30002, 30433, 30848, 32318, and 32266 (Table 5). In some embodiments, the at least one guide nucleic acid is complementary and bind to viral genomes, viral genes, or transcripts of the viral genomes and viral genes of TGEV. In some embodiments, the at least one guide nucleic acid is complementary and bind to viral genomes, viral genes, or transcripts of the viral genomes and viral genes of PRRSV. In some embodiments, one guide nucleic acid is complementary and bind to multiple regions of the viral genome, viral gene, or transcript of the viral genome or viral gene.

[0134] In some embodiments, the guide nucleic acid is complementary and bind a target viral gene of any of the virus described herein. In some embodiments, the target viral gene is an ASFV viral gene selected from the group consisting of: DP93R, B602L, DP86L, KP93L, B475L, KP86R, DP93R, KP360L, KP177R, L356L, L270L, U104L, XP124L, V82L, Y118L, X69R, J268L, J154R, J328L, J319L, A125L, A489R, A280R, A505R, A498R, A528R, A506R, A542R, A240L, A118R, A276R, A238L, A859L, A179L, A137R, F317L, F334L, F778R, F1055L, K205R, K78R, K196R, K145R, K421R, EP1242L, EP84R, EP424R, EP152R, EP153R, EP402R, EP364R, M1249L, M448R, C129R, C717R, C105R, C257L, C475L, C315R, C147L, C62L, C962R, B962L, B119L, B318L, B438L, B169L, B354L, B385R, B646L, B117L, B407L, B175L, B263R, B66L, G1340L, G1211R, CP123L, CP2475L, CP204L, CP530R, CP312R, O174L, 061R, NP1450L, NP419L, NP868R, D250R, D129L, D339L, D1133L, D117L, D205R, D345L, S183L, S273R, P1192R, H359L, H171R, H124R, H339R, H108R, H233R, H240R, R298L, Q706L, QP509L, QP383R, E184L, E183L, E423R, E301R, E146L, E199L, E165R, E248R, E120R, E296R, I267L, 1226R, I243L, 1329L, I215L, I177L, I196L, DP238L, DP311R, DP63R, DP542L, DP146L, DP148R, DP71L, DP96R, DP363R, DP60R, DP141L, E111R, D79L, CP80R, B125R, F165R, A151R, A104R, A224L, and KP362L.

[0135] In some embodiments, the nucleic acid-targeting region of a guide nucleic acid (e.g., spacer) comprises a sequence that is at least 50%, 60%, 70%, 80%, 90%, 95%, or 99% identical to a fragment of the SEQ ID NO: 6 (Table 3). In some embodiments, the nucleic acid-targeting region of a guide nucleic acid (e.g., spacer) comprises a sequence that is at least 50%, 60%, 70%, 80%, 90%, 95%, or 99% identical to a fragment of the SEQ ID NO: 7 (Table 3). In some instances, the nucleic acid-targeting region of a guide nucleic acid (e.g., spacer) comprises a sequence that is least 50%, 60%, 70%, 80%, 90%, 95%, or 99% identical to SEQ ID NOS: 10001-13274, SEQ ID NOS: 20001-23274, and SEQ ID NOS: 30001-33274 (Table 4). In some embodiments, the nucleic acid-targeting region of a guide nucleic acid (e.g., spacer) comprises a sequence that is least 50%, 60%, 70%, 80%, 90%, 95%, or 99% identical to SEQ ID NOS: 10001, 10002, 10433, 10848, 12318, 12266, 20001, 20002, 20433, 20848, 22318, 22266, 30001, 30002, 30433, 30848, 32318, or 32266 (Table 4 and Table 5).

[0136] In some embodiments, the guide nucleic acid is complementary and bind to at least two different regions of the target viral genome. In some embodiments, the guide nucleic acid is complementary and bind to at least two different regions a target viral gene. In some embodiments, the guide nucleic acid is complementary and bind to at least two different regions of at least two target viral genes.

[0137] A protospacer sequence of a targeted polynucleotide can be identified by identifying a protospacer adjacent motif (PAM) within a region of interest and selecting a region of a desired size upstream or downstream of the PAM as the protospacer. In some embodiments, the PAM sequence is recognized by Cas9 from Streptococcus pyogenes. A corresponding spacer sequence is designed by determining the complementary sequence of the protospacer region.

[0138] A spacer sequence can be identified using a computer program (e.g., machine readable code). The computer program can use variables such as predicted melting temperature, secondary structure formation, and predicted annealing temperature, sequence identity, genomic context, chromatin accessibility, % GC, frequency of genomic occurrence, methylation status, presence of SNPs, and the like.

[0139] The percent complementarity between the nucleic acid-targeting sequence (e.g., a spacer sequence of the at least one heterologous polypeptide as disclosed herein) and the target nucleic acid (e.g., a protospacer sequence of the one or more target viral genes as disclosed herein) can be at least 50%, at least 60%, at least 70%, at least 75%, at least 80%, at least 85%, at least 90%, at least 95%, at least 97%, at least 98%, at least 99%, or 100%. The percent complementarity between the nucleic acid-targeting sequence and the target nucleic acid can be at least 60%, at least 70%, at least 75%, at least 80%, at least 85%, at least 90%, at least 95%, at least 97%, at least 98%, at least 99%, or 100% over about 20 contiguous nucleotides.

[0140] The Cas protein-binding segment of a guide nucleic acid can comprise two stretches of nucleotides (e.g., crRNA and tracrRNA) that are complementary to one another. The two stretches of nucleotides (e.g., crRNA and tracrRNA) that are complementary to one another can be covalently linked by intervening nucleotides (e.g., a linker in the case of a single guide nucleic acid). The two stretches of nucleotides (e.g., crRNA and tracrRNA) that are complementary to one another can hybridize to form a double stranded RNA duplex or hairpin of the Cas protein-binding segment, thus resulting in a stem-loop structure. The crRNA and the tracrRNA can be covalently linked via the 3′ end of the crRNA and the 5′ end of the tracrRNA. Alternatively, tracrRNA and crRNA can be covalently linked via the 5′ end of the tracrRNA and the 3′ end of the crRNA.

[0141] The Cas protein binding segment of a guide nucleic acid can have a length of from about 10 nucleotides to about 100 nucleotides, e.g., from about 10 nucleotides (nt) to about 20 nt, from about 20 nt to about 30 nt, from about 30 nt to about 40 nt, from about 40 nt to about 50 nt, from about 50 nt to about 60 nt, from about 60 nt to about 70 nt, from about 70 nt to about 80 nt, from about 80 nt to about 90 nt, or from about 90 nt to about 100 nt. For example, the Cas protein-binding segment of a guide nucleic acid can have a length of from about 15 nucleotides (nt) to about 80 nt, from about 15 nt to about 50 nt, from about 15 nt to about 40 nt, from about 15 nt to about 30 nt or from about 15 nt to about 25 nt.

[0142] The dsRNA duplex of the Cas protein-binding segment of the guide nucleic acid can have a length from about 6 base pairs (bp) to about 50 bp. For example, the dsRNA duplex of the protein-binding segment can have a length from about 6 bp to about 40 bp, from about 6 bp to about 30 bp, from about 6 bp to about 25 bp, from about 6 bp to about 20 bp, from about 6 bp to about 15 bp, from about 8 bp to about 40 bp, from about 8 bp to about 30 bp, from about 8 bp to about 25 bp, from about 8 bp to about 20 bp or from about 8 bp to about 15 bp. For example, the dsRNA duplex of the Cas protein-binding segment can have a length from about from about 8 bp to about 10 bp, from about 10 bp to about 15 bp, from about 15 bp to about 18 bp, from about 18 bp to about 20 bp, from about 20 bp to about 25 bp, from about 25 bp to about 30 bp, from about 30 bp to about 35 bp, from about 35 bp to about 40 bp, or from about 40 bp to about 50 bp.

[0143] In some embodiments, the dsRNA duplex of the Cas protein-binding segment can have a length of 36 base pairs. The percent complementarity between the nucleotide sequences that hybridize to form the dsRNA duplex of the protein-binding segment can be at least about 60%. For example, the percent complementarity between the nucleotide sequences that hybridize to form the dsRNA duplex of the protein-binding segment can be at least about 65%, at least about 70%, at least about 75%, at least about 80%, at least about 85%, at least about 90%, at least about 95%, at least about 98%, or at least about 99%. In some cases, the percent complementarity between the nucleotide sequences that hybridize to form the dsRNA duplex of the protein-binding segment is 100%.

[0144] The linker (e.g., that links a crRNA and a tracrRNA in a single guide nucleic acid) can have a length of from about 3 nucleotides to about 100 nucleotides. For example, the linker can have a length of from about 3 nucleotides (nt) to about 90 nt, from about 3 nucleotides (nt) to about 80 nt, from about 3 nucleotides (nt) to about 70 nt, from about 3 nucleotides (nt) to about 60 nt, from about 3 nucleotides (nt) to about 50 nt, from about 3 nucleotides (nt) to about 40 nt, from about 3 nucleotides (nt) to about 30 nt, from about 3 nucleotides (nt) to about 20 nt or from about 3 nucleotides (nt) to about 10 nt. For example, the linker can have a length of from about 3 nt to about 5 nt, from about 5 nt to about 10 nt, from about 10 nt to about 15 nt, from about 15 nt to about 20 nt, from about 20 nt to about 25 nt, from about 25 nt to about 30 nt, from about 30 nt to about 35 nt, from about 35 nt to about 40 nt, from about 40 nt to about 50 nt, from about 50 nt to about 60 nt, from about 60 nt to about 70 nt, from about 70 nt to about 80 nt, from about 80 nt to about 90 nt, or from about 90 nt to about 100 nt. In some embodiments, the linker of a DNA-targeting RNA is 4 nt.

[0145] The heterologous polynucleotide or the guide nucleic acids can include modifications or sequences that provide for additional desirable features (e.g., modified or regulated stability; subcellular targeting; tracking with a fluorescent label; a binding site for a protein or protein complex; and the like). Examples of such modifications include, for example, a 5′ cap (a 7-methylguanylate cap (m7G)); a 3′ polyadenylated tail (a 3′ poly(A) tail); a riboswitch sequence (e.g., to allow for regulated stability and/or regulated accessibility by proteins and/or protein complexes); a stability control sequence; a sequence that forms a dsRNA duplex (a hairpin)); a modification or sequence that targets the RNA to a subcellular location (e.g., nucleus, mitochondria, chloroplasts, and the like); a modification or sequence that provides for tracking (e.g., direct conjugation to a fluorescent molecule, conjugation to a moiety that facilitates fluorescent detection, a sequence that allows for fluorescent detection, and so forth); a modification or sequence that provides a binding site for proteins (e.g., proteins that act on DNA, including transcriptional activators, transcriptional repressors, DNA methyl transferases, DNA demethylases, histone acetyltransferases, histone deacetylases, and combinations thereof.

[0146] The heterologous polynucleotide or the guide nucleic acid can comprise one or more modifications (e.g., a base modification, a backbone modification), to provide the nucleic acid with a new or enhanced feature (e.g., improved stability). A guide nucleic acid can comprise a nucleic acid affinity tag. A nucleoside can be a base-sugar combination. The base locus of the nucleotide can be a heterocyclic base, e.g., purines and pyrimidines. Nucleotides can be nucleosides that further include a phosphate group covalently linked to the sugar locus of the nucleoside. For those nucleosides that include a pentofuranosyl sugar, the phosphate group can be linked to the 2′, the 3′, or the 5′ hydroxyl moiety of the sugar. In forming guide nucleic acids, the phosphate groups can covalently link adjacent nucleosides to one another to form a linear polymeric compound. In turn, the respective ends of this linear polymeric compound can be further joined to form a circular compound; however, linear compounds can be suitable. In addition, linear compounds can have internal nucleotide base complementarity and can therefore fold in a manner as to produce a fully or partially double-stranded compound. Further, within guide nucleic acids, the phosphate groups can be referred to as forming the internucleoside backbone of the guide nucleic acid. The linkage or backbone of the guide nucleic acid can be a 3′ to 5′ phosphodiester linkage.

[0147] The heterologous polynucleotide or the guide nucleic acid can comprise a modified backbone and/or modified internucleoside linkages. Modified backbones can include those that retain a phosphorus atom in the backbone and those that do not have a phosphorus atom in the backbone. Suitable modified nucleic acid backbones containing a phosphorus atom therein can include, for example, phosphorothioates, chiral phosphorothioates, phosphorodithioates, phosphotriesters, aminoalkylphosphotriesters, methyl and other alkyl phosphonates such as 3′-alkylene phosphonates, 5′-alkylene phosphonates, chiral phosphonates, phosphinates, phosphoramidates including 3′-amino phosphoramidate and aminoalkylphosphoramidates, phosphorodiamidates, thionophosphoramidates, thionoalkylphosphonates, thionoalkylphosphotriesters, selenophosphates, and boranophosphates having normal 3′-5′ linkages, 2′-5′ linked analogs, and those having inverted polarity wherein one or more internucleotide linkages is a 3′ to 3′, a 5′ to 5′ or a 2′ to 2′ linkage. Suitable guide nucleic acids having inverted polarity can comprise a single 3′ to 3′ linkage at the 3′-most internucleotide linkage (such as a single inverted nucleoside residue in which the nucleobase is missing or has a hydroxyl group in place thereof). Various salts (e.g., potassium chloride or sodium chloride), mixed salts, and free acid forms can also be included.

[0148] The heterologous polynucleotide or the guide nucleic acid can comprise one or more phosphorothioate and/or heteroatom internucleoside linkages, in particular —CH2-NH—O—CH2-, —CH2-N(CH3)-O—CH2- (a methylene (methylimino) or MMI backbone), —CH2-O—N(CH3)-CH2-, —CH2-N(CH3)-N(CH3)-CH2- and —O—N(CH3)-CH2-CH2- (wherein the native phosphodiester internucleotide linkage is represented as —O—P(═O)(OH)—O—CH2-).

[0149] The heterologous polynucleotide or the guide nucleic acid can comprise a morpholino backbone structure. For example, a nucleic acid can comprise a 6-membered morpholino ring in place of a ribose ring. In some of these embodiments, a phosphorodiamidate or other non-phosphodiester internucleoside linkage replaces a phosphodiester linkage.

[0150] The heterologous polynucleotide or the guide nucleic acid can comprise polynucleotide backbones that are formed by short chain alkyl or cycloalkyl internucleoside linkages, mixed heteroatom and alkyl or cycloalkyl internucleoside linkages, or one or more short chain heteroatomic or heterocyclic internucleoside linkages. These can include those having morpholino linkages (formed in part from the sugar locus of a nucleoside); siloxane backbones; sulfide, sulfoxide and sulfone backbones; formacetyl and thioformacetyl backbones; methylene formacetyl and thioformacetyl backbones; riboacetyl backbones; alkene containing backbones; sulfamate backbones; methyleneimino and methylenehydrazino backbones; sulfonate and sulfonamide backbones; amide backbones; and others having mixed N, O, S and CH2 component parts.

[0151] The heterologous polynucleotide or the guide nucleic acid can comprise a nucleic acid mimetic. The term “mimetic” can be intended to include polynucleotides wherein only the furanose ring or both the furanose ring and the internucleotide linkage are replaced with non-furanose groups, replacement of only the furanose ring can also be referred as being a sugar surrogate. The heterocyclic base moiety or a modified heterocyclic base moiety can be maintained for hybridization with an appropriate target nucleic acid. One such nucleic acid can be a peptide nucleic acid (PNA). In a PNA, the sugar-backbone of a polynucleotide can be replaced with an amide containing backbone, in particular an aminoethylglycine backbone. The nucleotides can be retained and are bound directly or indirectly to aza nitrogen atoms of the amide locus of the backbone. The backbone in PNA compounds can comprise two or more linked aminoethylglycine units which gives PNA an amide containing backbone. The heterocyclic base moieties can be bound directly or indirectly to aza nitrogen atoms of the amide locus of the backbone.

[0152] The heterologous polynucleotide or the guide nucleic acid can comprise linked morpholino units (morpholino nucleic acid) having heterocyclic bases attached to the morpholino ring. Linking groups can link the morpholino monomeric units in a morpholino nucleic acid. Non-ionic morpholino-based oligomeric compounds can have less undesired interactions with cellular proteins. Morpholino-based polynucleotides can be non-ionic mimics of guide nucleic acids. A variety of compounds within the morpholino class can be joined using different linking groups. A further class of polynucleotide mimetic can be referred to as cyclohexenyl nucleic acids (CeNA). The furanose ring normally present in a nucleic acid molecule can be replaced with a cyclohexenyl ring. CeNA DMT protected phosphoramidite monomers can be prepared and used for oligomeric compound synthesis using phosphoramidite chemistry. The incorporation of CeNA monomers into a nucleic acid chain can increase the stability of a DNA/RNA hybrid. CeNA oligoadenylates can form complexes with nucleic acid complements with similar stability to the native complexes. A further modification can include Locked Nucleic Acids (LNAs) in which the 2′-hydroxyl group is linked to the 4′ carbon atom of the sugar ring thereby forming a 2′-C,4′-C-oxymethylene linkage thereby forming a bicyclic sugar moiety. The linkage can be a methylene (—CH2-), group bridging the 2′ oxygen atom and the 4′ carbon atom wherein n is 1 or 2. LNA and LNA analogs can display very high duplex thermal stabilities with complementary nucleic acid (Tm=+3 to +10° C.), stability towards 3′-exonucleolytic degradation and good solubility properties.

[0153] The heterologous polynucleotide or the guide nucleic acid can comprise one or more substituted sugar moieties. Suitable polynucleotides can comprise a sugar substituent group selected from: OH; F; O-, S-, or N-alkyl; O-, S-, or N-alkenyl; O-, S- or N-alkynyl; or O-alkyl-O-alkyl, wherein the alkyl, alkenyl and alkynyl can be substituted or unsubstituted C1 to C10 alkyl or C2 to C10 alkenyl and alkynyl. Particularly suitable are O((CH2)nO)mCH3, O(CH2)nOCH3, O(CH2)nNH2, O(CH2)nCH3, O(CH2)nONH2, and O(CH2)nON((CH2)nCH3)2, where n and m are from 1 to about 10. A sugar substituent group can be selected from: C1 to C10 lower alkyl, substituted lower alkyl, alkenyl, alkynyl, alkaryl, aralkyl, O-alkaryl or O-aralkyl, SH, SCH3, OCN, Cl, Br, CN, CF3, OCF3, SOCH3, SO2CH3, ONO2, NO2, N3, NH2, heterocycloalkyl, heterocycloalkaryl, aminoalkylamino, polyalkylamino, substituted silyl, an RNA cleaving group, a reporter group, an intercalator, a group for improving the pharmacokinetic properties of an guide nucleic acid, or a group for improving the pharmacodynamic properties of an guide nucleic acid, and other substituents having similar properties. A suitable modification can include 2′-methoxyethoxy (2′-O-CH2 CH2OCH3, also known as 2′-O-(2-methoxyethyl) or 2′-MOE, an alkoxyalkoxy group). A further suitable modification can include 2′-dimethylaminooxyethoxy, (a O(CH2)20N(CH3)2 group, also known as 2′-DMAOE), and 2′-dimethylaminoethoxyethoxy (also known as 2′-O-dimethyl-amino-ethoxy-ethyl or 2′-DMAEOE), 2′-O—CH2-O—CH2-N(CH3)2.

[0154] Other suitable sugar substituent groups can include methoxy (—O—CH3), aminopropoxy (—OCH2 CH2NH2), allyl (—CH2-CH═CH2), —O-allyl (—O—CH2-CH═CH2) and fluoro (F). 2′-sugar substituent groups can be in the arabino (up) position or ribo (down) position. A suitable 2′-arabino modification is 2′-F. Similar modifications can also be made at other positions on the oligomeric compound, particularly the 3′ position of the sugar on the 3′ terminal nucleoside or in 2′-5′ linked nucleotides and the 5′ position of 5′ terminal nucleotide. Oligomeric compounds can also have sugar mimetics such as cyclobutyl moieties in place of the pentofuranosyl sugar.

[0155] The heterologous polynucleotide or the guide nucleic acid can also include nucleobase (or “base”) modifications or substitutions. As used herein, “unmodified” or “natural” nucleobases can include the purine bases, (e.g. adenine (A) and guanine (G)), and the pyrimidine bases, (e.g. thymine (T), cytosine (C) and uracil (U)). Modified nucleobases can include other synthetic and natural nucleobases such as 5-methylcytosine (5-me-C), 5-hydroxymethyl cytosine, xanthine, hypoxanthine, 2-aminoadenine, 6-methyl and other alkyl derivatives of adenine and guanine, 2-propyl and other alkyl derivatives of adenine and guanine, 2-thiouracil, 2-thiothymine and 2-thiocytosine, 5-halouracil and cytosine, 5-propynyl (—C═C-CH3) uracil and cytosine and other alkynyl derivatives of pyrimidine bases, 6-azo uracil, cytosine and thymine, 5-uracil (pseudouracil), 4-thiouracil, 8-halo, 8-amino, 8-thiol, 8-thioalkyl, 8-hydroxyl and other 8-substituted adenines and guanines, 5-halo particularly 5-bromo, 5-trifluoromethyl and other 5-substituted uracils and cytosines, 7-methylguanine and 7-methyladenine, 2-F-adenine, 2-amino¬adenine, 8-azaguanine and 8-azaadenine, 7-deazaguanine and 7-deazaadenine and 3-deazaguanine and 3-deazaadenine. Modified nucleobases can include tricyclic pyrimidines such as phenoxazine cytidine(1H-pyrimido(5,4-b)(1,4)benzoxazin-2(3H)-one), phenothiazine cytidine (1H-pyrimido(5,4-b)(1,4)benzothiazin-2(3H)-one), G-clamps such as a substituted phenoxazine cytidine (e.g. 9-(2-aminoethoxy)-H-pyrimido(5,4-(b) (1,4)benzoxazin-2(3H)-one), carbazole cytidine (2H-pyrimido(4,5-b)indol-2-one), pyridoindole cytidine (H¬pyrido(3′,2′:4,5)pyrrolo(2,3-d)pyrimidin-2-one).

[0156] Heterocyclic base moieties can include those in which the purine or pyrimidine base is replaced with other heterocycles, for example 7-deaza-adenine, 7-deazaguanosine, 2-aminopyridine and 2-pyridone. Nucleobases can be useful for increasing the binding affinity of a polynucleotide compound. These can include 5-substituted pyrimidines, 6-azapyrimidines and N-2, N-6 and O-6 substituted purines, including 2-aminopropyladenine, 5-propynyluracil and 5-propynylcytosine. 5-methylcytosine substitutions can increase nucleic acid duplex stability by 0.6-1.2° C. and can be suitable base substitutions (e.g., when combined with 2′-O-methoxyethyl sugar modifications).

[0157] A modification of the heterologous polynucleotide or the guide nucleic acid can comprise chemically linking to the guide nucleic acid one or more moieties or conjugates that can enhance the activity, cellular distribution or cellular uptake of the guide nucleic acid. These moieties or conjugates can include conjugate groups covalently bound to functional groups such as primary or secondary hydroxyl groups. Conjugate groups can include, but are not limited to, intercalators, reporter molecules, polyamines, polyamides, polyethylene glycols, polyethers, groups that enhance the pharmacodynamic properties of oligomers, and groups that can enhance the pharmacokinetic properties of oligomers. Conjugate groups can include, but are not limited to, cholesterols, lipids, phospholipids, biotin, phenazine, folate, phenanthridine, anthraquinone, acridine, fluoresceins, rhodamines, coumarins, and dyes. Groups that enhance the pharmacodynamic properties include groups that improve uptake, enhance resistance to degradation, and/or strengthen sequence-specific hybridization with the target nucleic acid. Groups that can enhance the pharmacokinetic properties include groups that improve uptake, distribution, metabolism or excretion of a nucleic acid. Conjugate moieties can include but are not limited to lipid moieties such as a cholesterol moiety, cholic acid a thioether, (e.g., hexyl-S-tritylthiol), a thiocholesterol, an aliphatic chain (e.g., dodecandiol or undecyl residues), a phospholipid (e.g., di-hexadecyl-rac-glycerol or triethylammonium 1,2-di-O-hexadecyl-rac-glycero-3-H-phosphonate), a polyamine or a polyethylene glycol chain, or adamantane acetic acid, a palmityl moiety, or an octadecylamine or hexylamino-carbonyl-oxycholesterol moiety.

### Pharmaceutical Composition

[0158] A pharmaceutical composition, as used herein, refers to a mixture of the compositions described herein to prevent or treat viral infection caused by one or more strains of virus in cells or non-human mammals by targeting and cleaving viral genomes, viral genes, or transcripts of viral genomes or viral genes. In some embodiments, the pharmaceutical composition comprises the compositions described herein as the active ingredients. In some embodiments, the composition comprises the heterologous polypeptide described herein. In some instances, the heterologous polypeptide comprises the gene regulating moiety described herein. In some instances, the composition comprises the heterologous polynucleotide described herein. In some embodiments, the heterologous polynucleotide encodes the heterologous polypeptide described herein. In some embodiments, the heterologous polynucleotide encodes the one or more guide nucleic acids described herein. In some embodiments, the one or more guide nucleic acids comprise nucleic acid sequence of any one of the SEQ ID NOS disclosed herein. In some embodiments, the one or more guide nucleic acids comprises nucleic acid sequence of any one of the SEQ ID NOS in Table 4 or Table 5.

[0159] The pharmaceutical composition described herein can further comprise other chemical components (i.e. pharmaceutically acceptable inactive ingredients), such as carriers, excipients, binders, filling agents, suspending agents, flavoring agents, sweetening agents, disintegrating agents, dispersing agents, surfactants, lubricants, colorants, diluents, solubilizers, moistening agents, plasticizers, stabilizers, penetration enhancers, wetting agents, anti-foaming agents, antioxidants, preservatives, or one or more combination thereof. Optionally, the compositions include two or more composition (e.g., one or more compositions and one or more additional agents) as discussed herein. In practicing the methods of treatment or use provided herein, therapeutically effective amounts of compositions described herein are administered in a pharmaceutical composition to a non-human mammal having a viral infection, viral disease, or symptoms or conditions associated with the viral infection or the viral disease. In some embodiments, the non-human mammal is an artiodactyl. In some cases, the artiodactyl is a pig. A therapeutically effective amount can vary widely depending on the severity of the viral infection or viral disease, the age and relative health of the subject, the potency of the composition used and other factors. The compositions can be used singly or in combination with one or more compositions as components of mixtures.

[0160] The pharmaceutical formulations described herein are administered to a subject by appropriate administration routes, including but not limited to, intravenous, intraarterial, oral, parenteral, buccal, topical, transdermal, rectal, intramuscular, subcutaneous, intraosseous, transmucosal, inhalation, or intraperitoneal administration routes. The pharmaceutical formulations described herein include, but are not limited to, aqueous liquid dispersions, self-emulsifying dispersions, solid solutions, liposomal dispersions, aerosols, solid dosage forms, powders, immediate release formulations, controlled release formulations, fast melt formulations, tablets, capsules, pills, delayed release formulations, extended release formulations, pulsatile release formulations, multiparticulate formulations, and mixed immediate and controlled release formulations

### Methods of Genetic Modification

[0161] Described herein, in some embodiments, are methods of genetically modifying a cell to enhance resistance to viral infection. In some embodiments, the cell can be an embryonic, fetal, or adult cell of any type; germ cells such as an oocyte or an egg; an adult or embryonic stem cell; a primordial germ cell; a kidney cell, a liver cell, or a fibroblast. In some embodiments, the cell is a somatic cell. In some embodiments, the cell is a stem cell or a progenitor cell. In some embodiments, the cell is a mesenchymal stem or progenitor cell. In some embodiments, the cell is a hematopoietic stem. In some embodiments, the cell is a muscle cell, a skin cell, a blood cell, or an immune cell. In some embodiments the cell can be an embryonic, fetal, or adult artiodactyl cell. In some embodiments, the artiodactyl cell be a pig cell.

[0162] In some embodiments, the method comprises contacting the cell with a composition. In some embodiments, the composition can comprise at least one heterologous polypeptide described herein. In some cases, the composition can comprise at least one heterologous polynucleotide described herein. In some instances, the composition can comprise at least one of the heterologous polypeptide and the heterologous polynucleotide described herein. In some embodiments, heterologous polynucleotide encoding the gene regulating moiety and/or the guide nucleic acid can be delivered into the cell via any of the transfection methods described herein. In some embodiments, heterologous polynucleotide encoding the gene regulating moiety and/or the guide nucleic acid can be delivered into the cell via the use of expression vectors. In the context of an expression vector, the vector can be readily introduced into the cell described herein by any method in the art. For example, the expression vector can be transferred into the cell by physical, chemical, or biological means.

[0163] Physical methods for introducing the heterologous polynucleotide into the cell can include calcium phosphate precipitation, lipofection, particle bombardment, microinjection, gene gun, electroporation, and the like. Methods for producing cells comprising vectors and/or exogenous nucleic acids are suitable for methods herein (see, e.g., Sambrook et al., 2012, Molecular Cloning: A Laboratory Manual, volumes 1-4, Cold Spring Harbor Press, NY). One method for the introduction of a polynucleotide into a host cell is calcium phosphate transfection.

[0164] Biological methods for introducing a heterologous polynucleotide of interest into the cell can include the use of DNA and RNA vectors. Viral vectors, and especially retroviral vectors, have become the most widely used method for inserting genes into non-human mammalian cells. Other viral vectors, in some embodiments, are derived from lentivirus, poxviruses, herpes simplex virus I, adenoviruses and adeno-associated viruses, and the like. Exemplary viral vectors include retroviral vectors, adenoviral vectors, adeno-associated viral vectors (AAVs), pox vectors, parvoviral vectors, baculovirus vectors, measles viral vectors, or herpes simplex virus vectors (HSVs). In some instances, the retroviral vectors include gamma-retroviral vectors such as vectors derived from the Moloney Murine Keukemia Virus (MoMLV, MMLV, MuLV, or MLV) or the Murine Steam cell Virus (MSCV) genome. In some instances, the retroviral vectors also include lentiviral vectors such as those derived from the human immunodeficiency virus (HIV) genome. In some instances, AAV vectors include AAV1, AAV2, AAV4, AAV5, AAV6, AAV7, AAV8, or AAV9 serotype. In some instances, viral vector is a chimeric viral vector, comprising viral portions from two or more viruses. In additional instances, the viral vector is a recombinant viral vector.

[0165] Chemical means for introducing the heterologous into the cell can include colloidal dispersion systems, such as macromolecule complexes, nanocapsules, microspheres, beads, and lipid-based systems including oil-in-water emulsions, micelles, mixed micelles, and liposomes. An exemplary colloidal system for use as a delivery vehicle in vitro and in vivo is a liposome (e.g., an artificial membrane vesicle). Other methods of state-of-the-art targeted delivery of nucleic acids are available, such as delivery of polynucleotides with targeted nanoparticles or other suitable sub-micron sized delivery system.

[0166] In the case where a non-viral delivery system is utilized, an exemplary delivery vehicle is a liposome. The use of lipid formulations is contemplated for the introduction of the nucleic acids into a host cell (in vitro, ex vivo or in vivo). In another aspect, the nucleic acid is associated with a lipid. The nucleic acid associated with a lipid, in some embodiments, is encapsulated in the aqueous interior of a liposome, interspersed within the lipid bilayer of a liposome, attached to a liposome via a linking molecule that is associated with both the liposome and the oligonucleotide, entrapped in a liposome, complexed with a liposome, dispersed in a solution containing a lipid, mixed with a lipid, combined with a lipid, contained as a suspension in a lipid, contained or complexed with a micelle, or otherwise associated with a lipid. Lipid, lipid/DNA or lipid/expression vector associated compositions are not limited to any particular structure in solution. For example, in some embodiments, they are present in a bilayer structure, as micelles, or with a “collapsed” structure. Alternately, they are simply be interspersed in a solution, possibly forming aggregates that are not uniform in size or shape. Lipids are fatty substances which are, in some embodiments, naturally occurring or synthetic lipids. For example, lipids include the fatty droplets that naturally occur in the cytoplasm as well as the class of compounds which contain long-chain aliphatic hydrocarbons and their derivatives, such as fatty acids, alcohols, amines, amino alcohols, and aldehydes.

[0167] Lipids suitable for use are obtained from commercial sources. For example, in some embodiments, dimyristyl phosphatidylcholine (“DMPC”) is obtained from Sigma, St. Louis, Mo.; in some embodiments, dicetyl phosphate (“DCP”) is obtained from K & K Laboratories (Plainview, N.Y.); cholesterol (“Choi”), in some embodiments, is obtained from Calbiochem-Behring; dimyristyl phosphatidylglycerol (“DMPG”) and other lipids are often obtained from Avanti Polar Lipids, Inc. (Birmingham, Ala.). Stock solutions of lipids in chloroform or chloroform/methanol are often stored at about −20° C. Chloroform is used as the only solvent since it is more readily evaporated than methanol. “Liposome” is a generic term encompassing a variety of single and multilamellar lipid vehicles formed by the generation of enclosed lipid bilayers or aggregates. Liposomes are often characterized as having vesicular structures with a phospholipid bilayer membrane and an inner aqueous medium. Multilamellar liposomes have multiple lipid layers separated by aqueous medium. They form spontaneously when phospholipids are suspended in an excess of aqueous solution. The lipid components undergo self-rearrangement before the formation of closed structures and entrap water and dissolved solutes between the lipid bilayers (Ghosh et al., 1991 Glycobiology 5: 505-10). However, compositions that have different structures in solution than the normal vesicular structure are also encompassed. For example, the lipids, in some embodiments, assume a micellar structure or merely exist as nonuniform aggregates of lipid molecules. Also contemplated are lipofectamine-nucleic acid complexes.

[0168] In some cases, the composition described herein can be packaged and delivered to the cell via extracellular vesicles. The extracellular vesicles can be any membrane-bound particles. In some embodiments, the extracellular vesicles can be any membrane-bound particles secreted by at least one cell. In some instances, the extracellular vesicles can be any membrane-bound particles synthesized in vitro. In some instances, the extracellular vesicles can be any membrane-bound particles synthesized without a cell. In some cases, the extracellular vesicles can be exosomes, microvesicles, retrovirus-like particles, apoptotic bodies, apoptosomes, oncosomes, exophers, enveloped viruses, exomeres, or other very large extracellular vesicles.

[0169] In some cases, the composition described herein can be administered to the subject in need thereof via the use of genetically engineered cells generated by introduction of the compositions first into allogeneic or autologous cells. The genetically engineered cells can the confer the treatment effects of the compositions to the subject infected by the viral infection or viral disease.

[0170] In some embodiments, the composition can be delivered cells to reduce or eliminate expression of viral genes, where these cells can then be subsequently administered to a subject in need thereof for treatment purposes. In some cases, these cells can be autologous (i.e. transplantation using the subject's own cells) or allogenic.

### Methods of Generating Genetically Modified Non-Human Mammal

[0171] In some embodiments, the cell transfected or contacted with the composition describe herein is used to generate genetically modified tissue, organ, or non-human mammal. In some embodiments, the genetically modified non-human mammal comprises the genetically modified cell, tissue, or organ described herein. In some embodiments, the genetically modified cells transfected or contacted with the composition describe herein is used to generate genetically modified tissue, organ, or non-human mammal. In some embodiments, the genetically modified non-human mammal is a genetically modified artiodactyl. In some embodiments, the genetically modified artiodactyl is a genetically modified pig. In some embodiments, the genetically modified pig can include founder genetically modified pig, progeny of the genetically modified pig, and progeny of progeny and so on. The method of generating a genetically modified non-human mammal can comprise methods for establishing founders. Such methods can include, for example, pronuclear microinjection, retroviral mediated gene transfer into germ lines, gene targeting into embryonic stem cell, somatic nuclear transfer, electroporation of embryos, sperm mediated gene transfer, and in vitro transformation of somatic cells. For somatic cell nuclear transfer, a genetically modified cell (e.g., a genetically modified pig cell) such as an embryonic blastomere, fetal fibroblast, or adult fibroblast can be introduced into an enucleated oocyte. In some embodiments, oocytes can be enucleated by partial zona dissection near the polar body and then pressing out cytoplasm at the dissection area. In some embodiments, an injection pipette with a sharp beveled tip is used to inject the genetically modified cell into an enucleated oocyte arrested at meiosis-2. Oocytes arrested at meiosis-2 are frequently termed “eggs.” In some embodiments, an embryo is generated by fusing and activating the oocyte. Such an embryo may be referred to herein as a “genetically modified embryo.” In some embodiments, the genetically modified embryo is transferred to the oviducts of a recipient female pig. In some embodiments, the genetically modified embryo is transferred to the oviducts of a recipient female pig 20 to 24 hours after activation. See, e.g., Cibelli 1998 and U.S. Pat. No. 6,548,741. In some embodiments, recipient females can be checked for pregnancy approximately 20-21 days after transfer of the genetically modified embryo. In some embodiments, the genetically modified embryo is grown into a post-natal genetically modified non-human mammal. In some embodiments, the post-natal genetically modified non-human mammal is a neo-natal genetically modified non-human mammal.

[0172] In some embodiments the genetically modified non-human mammal is a non-human mammal having one or more modified endogenous genes and maintains a same or similar level of expression or inactivation of the modified endogenous gene for at least a month, at least 6 months, at least 1 year, at least 5 years, at least 10 years post-gestation.

[0173] In some cases, breeding techniques can create progeny homozygous for the genetically modified endogenous genes. In some cases, breeding techniques can create progeny comprising the composition described herein. In some embodiments, the presence or expression level of the genetically modified endogenous gene or the composition in the genetically modified cell, tissue, organ, or non-human mammal can be screened with Southern blotting, PCR, qPCR, or western blotting.

### Methods of Treatment

[0174] Disclosed herein, in some embodiments, are methods of treating a viral infection or disease, or a symptom of the viral infection or disease, in a non-human mammal subject, comprising administrating of therapeutic effective amount of the compositions or pharmaceutical compositions described herein to the subject. In some embodiments, the subject can be an artiodactyl. In some cases, the subject can be a pig. In some embodiments, the method reduces expression of one or more endogenous genes, a target viral genome, or a target viral gene in a cell, comprising steps of: contacting the cell with the compositions as described in the instant disclosure; upon said contacting, said composition reduces expression of said one or more endogenous genes or target viral gene in said cell. In some embodiments, the contacting occurs in vivo, ex vivo, or in vitro. In some embodiments, the composition can be expressed in said cell vial delivery of heterologous polynucleotides encoding the composition to said cell. In some embodiment, the composition or can directly administered to the subject.

[0175] In some embodiments, the composition can be administered to the subject alone (e.g., standalone treatment). In some embodiments, the composition is administered in combination with an additional agent. In some embodiments, the composition is a first-line treatment for the disease or condition. In some embodiments, the composition is a second-line, third-line, or fourth-line treatment, for the viral infection or viral disease. In some embodiments, the compositions are useful for the treatment of the viral infection or viral disease, or symptom of the viral infection or viral disease, disclosed herein.

[0176] In some embodiments, the composition can comprise a gene regulating moiety and at least one guide nucleic acid. In some embodiments, the composition can comprise at least one, two, three, four, five, six, seven, eight, nine, ten, 20, 30 or more guide nucleic acids. In some embodiments, each of the guide nucleic acid can be complementary and bind to at least two different regions of the target viral genome. In some embodiments, the guide nucleic acid can be complementary and bind to at least two different regions a target viral genome. In some embodiments, the guide nucleic acid can be complementary and bind to at least two different regions of at least two target viral genes. In some embodiments, the composition comprising the at least one guide nucleic acid can target and cleave at least one, two, three, four, five, six, seven, eight, nine, ten, 11, 12, 13, 14, 15, 16, 17, 18, 19, 20, 30, or more regions of a viral genome or viral gene. In some embodiments, the viral genome or viral gene can be from any of the virus described herein. In some embodiments, the composition comprising the at least one guide nucleic acid can target and cleave at least one, two, three, four, five, six, seven, eight, nine, ten, 11, 12, 13, 14, 15, 16, 17, 18, 19, 20, 30, or more regions of viral genomes or viral genes of at least two families of virus. In some embodiments, the composition comprising the at least one guide nucleic acid can target and cleave at least one, two, three, four, five, six, seven, eight, nine, ten, 11, 12, 13, 14, 15, 16, 17, 18, 19, 20, 30, or more regions of viral genomes or viral genes of at least three families of virus. In some embodiments, the composition comprising the at least one guide nucleic acid can target and cleave at least one, two, three, four, five, six, seven, eight, nine, ten, 11, 12, 13, 14, 15, 16, 17, 18, 19, 20, 30, or more regions of viral genomes or viral genes of at least two genera of virus. In some embodiments, the composition comprising the at least one guide nucleic acid can target and cleave at least one, two, three, four, five, six, seven, eight, nine, ten, 11, 12, 13, 14, 15, 16, 17, 18, 19, 20, 30, or more regions of viral genomes or viral genes of at least three genera of virus. In some embodiments, the composition comprising the at least one guide nucleic acid can target and cleave at least one, two, three, four, five, six, seven, eight, nine, ten, 11, 12, 13, 14, 15, 16, 17, 18, 19, 20, 30, or more regions of viral genomes or viral genes of at least two strains of virus. In some embodiments, the composition comprising the at least one guide nucleic acid can target and cleave at least one, two, three, four, five, six, seven, eight, nine, ten, 11, 12, 13, 14, 15, 16, 17, 18, 19, 20, 30, or more regions of viral genomes or viral genes of at least three strains of virus. In some embodiments, the composition comprising the at least one guide nucleic acid can target and cleave at least one, two, three, four, five, six, seven, eight, nine, ten, 11, 12, 13, 14, 15, 16, 17, 18, 19, 20, 30, or more regions of viral genomes or viral genes of PRRSV, TGEV, and ASFV. In some embodiments, the composition comprising the at least one guide nucleic acid can target and cleave at least one, two, three, four, five, six, seven, eight, nine, ten, 11, 12, 13, 14, 15, 16, 17, 18, 19, 20, 30, or more regions of viral genomes or viral genes of PRRSV and TGEV. In some embodiments, the composition comprising the at least one guide nucleic acid can target and cleave at least one, two, three, four, five, six, seven, eight, nine, ten, 11, 12, 13, 14, 15, 16, 17, 18, 19, 20, 30, or more regions of viral genomes or viral genes of PRRSV and ASFV. In some embodiments, the composition comprising the at least one guide nucleic acid can target and cleave at least one, two, three, four, five, six, seven, eight, nine, ten, 11, 12, 13, 14, 15, 16, 17, 18, 19, 20, 30, or more regions of viral genomes or viral genes of TGEV and ASFV. In some embodiments, the composition comprising the at least one guide nucleic acid can target and cleave at least one, two, three, four, five, six, seven, eight, nine, ten, 11, 12, 13, 14, 15, 16, 17, 18, 19, 20, 30, or more regions of PRRSV viral genomes or viral genes. In some embodiments, the composition comprising the at least one guide nucleic acid can target and cleave at least one, two, three, four, five, six, seven, eight, nine, ten, 11, 12, 13, 14, 15, 16, 17, 18, 19, 20, 30, or more regions of TGEV viral genomes or viral genes. In some embodiments, the composition comprising the at least one guide nucleic acid can target and cleave at least one, two, three, four, five, six, seven, eight, nine, ten, 11, 12, 13, 14, 15, 16, 17, 18, 19, 20, 30, or more regions of ASFV viral genomes or viral genes.

[0177] In general, method disclosed herein can comprise administering a composition by oral administration. However, in some instances, method can comprise administering a composition by intraperitoneal injection. In some instances, method can comprise administering a composition in the form of an anal suppository. In some instances, method can comprise administering a composition by intravenous (“i.v.”) administration. It is conceivable that one can also administer compositions disclosed herein by other routes, such as subcutaneous injection, intramuscular injection, intradermal injection, transdermal injection percutaneous administration, intranasal administration, intralymphatic injection, rectal administration intragastric administration, or any other suitable parenteral administration. In some embodiments, routes for local delivery closer to site of injury or inflammation are preferred over systemic routes. Routes, dosage, time points, and duration of administrating therapeutics can be adjusted. In some embodiments, administration of therapeutics is prior to, or after, onset of either, or both, acute and chronic symptoms of the disease or condition.

[0178] An effective dose and dosage of the compositions to prevent or treat the viral infection or viral disease disclosed herein is defined by an observed beneficial response related to the viral infection or viral disease, or symptom of the viral infection or viral disease. In some cases, the beneficial response comprises reduction of expression of viral genomes or viral genes as determined by the methods describe herein. Additional beneficial response comprises preventing, alleviating, arresting, or curing the viral infection or viral disease, or symptom of the viral infection or viral disease. An “improvement,” as used herein refers to reduction in expression of viral genomes or viral genes in the cells or in a sample obtained from the subject. In instances where the composition is not therapeutically effective or is not providing a sufficient alleviation of the disease or condition, or symptom of the disease or condition, then the dosage amount and/or route of administration can be changed, or an additional agent can be administered to the subject, along with the composition. In some embodiments, as a subject is started on a regimen of a composition, the subject is also weaned off (e.g., step-wise decrease in dose) a second treatment regimen.

[0179] Suitable dose and dosage administrated to a subject is determined by factors including, but no limited to, the particular composition, disease condition and its severity, the identity (e.g., weight, sex, age) of the subject in need of treatment, and can be determined according to the particular circumstances surrounding the case, including, e.g., the specific agent being administered, the route of administration, the condition being treated, and the subject being treated.

[0180] In some embodiments, the administration of the composition is hourly, once every 2 hours, 3 hours, 4 hours, 5 hours, 6 hours, 7 hours, 8 hours, 9 hours, 10 hours, 11 hours, 12 hours, 13 hours, 14 hours, 15 hours, 16 hours, 17 hours, 18 hours, 19 hours, 20 hours, 21 hours 22 hours, 23 hours, 1 day, 2 days, 3 days, 4 days, 5 days, 6 days, 7 days, 8 days, 9 days, 10 days, 11 days, 12 days, 13 days, 14 days, 15 days, 1 month, 2 months, 3 months, 4 months, 5 months, 6 months, 7 months, 8 months, 9 months, 10 months, 11 months, 1 year, 2 years, 3 years, 4 years, or 5 years, or 10 years. The effective dosage ranges can be adjusted based on subject's response to the treatment. Some routes of administration will require higher concentrations of effective amount of therapeutics than other routes.

[0181] In certain embodiments, where the subject's condition does not improve, upon the doctor's discretion the administration of composition is administered chronically, that is, for an extended period of time, including throughout the duration of the subject's life in order to ameliorate or otherwise control or limit the symptoms of the subject's disease or condition. In certain embodiments wherein a subject's status does improve, the dose of composition being administered can be temporarily reduced or temporarily suspended for a certain length of time (i.e., a “drug holiday”). In specific embodiments, the length of the drug holiday is between 2 days and 1 year, including by way of example only, 2 days, 3 days, 4 days, 5 days, 6 days, 7 days, 10 days, 12 days, 15 days, 20 days, 28 days, or more than 28 days. The dose reduction during a drug holiday is, by way of example only, by 10%-100%, including by way of example only 10%, 15%, 20%, 25%, 30%, 35%, 40%, 45%, 50%, 55%, 60%, 65%, 70%, 75%, 80%, 85%, 90%, 95%, and 100%. In certain embodiments, the dose of drug being administered can be temporarily reduced or temporarily suspended for a certain length of time (i.e., a “drug diversion”). In specific embodiments, the length of the drug diversion is between 2 days and 1 year, including by way of example only, 2 days, 3 days, 4 days, 5 days, 6 days, 7 days, 10 days, 12 days, 15 days, 20 days, 28 days, or more than 28 days. The dose reduction during a drug diversion is, by way of example only, by 10%-100%, including by way of example only 10%, 15%, 20%, 25%, 30%, 35%, 40%, 45%, 50%, 55%, 60%, 65%, 70%, 75%, 80%, 85%, 90%, 95%, and 100%. After a suitable length of time, the normal dosing schedule is optionally reinstated.

[0182] In some embodiments, once improvement of the subject's conditions has occurred, a maintenance dose is administered if necessary. Subsequently, in specific embodiments, the dosage or the frequency of administration, or both, is reduced, as a function of the symptoms, to a level at which the improved disease, disorder or condition is retained. In certain embodiments, however, the subject requires intermittent treatment on a long-term basis upon any recurrence of symptoms.

[0183] Toxicity and therapeutic efficacy of such therapeutic regimens are determined by standard pharmaceutical procedures in cell cultures or experimental animals, including, but not limited to, the determination of the LD50 and the ED50. The dose ratio between the toxic and therapeutic effects is the therapeutic index and it is expressed as the ratio between LD50 and ED50. In certain embodiments, the data obtained from cell culture assays and animal studies are used in formulating the therapeutically effective daily dosage range and/or the therapeutically effective unit dosage amount for use in mammals, including humans. In some embodiments, the daily dosage amount of the composition described herein lies within a range of circulating concentrations that include the ED50 with minimal toxicity. In certain embodiments, the daily dosage range and/or the unit dosage amount varies within this range depending upon the dosage form employed and the route of administration utilized.

[0184] A composition can be used alone or in combination with an additional agent. In some cases, an “additional agent” as used herein is administered alone. The composition and the additional agent can be administered together or sequentially. The combination therapies can be administered within the same day, or can be administered one or more days, weeks, months, or years apart.

### Kit

[0185] Disclosed herein, in some embodiments, are kits comprising the compositions or pharmaceutical compositions described herein. In some embodiments, the kits disclosed herein can be used to treat a viral infection or viral disease in a subject; or select a subject for treatment and/or monitor a treatment disclosed herein. In some embodiments, the kit comprises the compositions described herein, which can be used to perform the methods described herein. Kits comprise an assemblage of materials or components, including at least one of the compositions. Thus, in some embodiments the kit contains a composition including of the pharmaceutical composition, for the treatment of the viral infection or viral disease. In other embodiments, the kits contains all of the components necessary and/or sufficient to perform an assay for detecting and measuring viral markers, including all controls, directions for performing assays, and any necessary software for analysis and presentation of results.

[0186] In some instances, the kits described herein comprise components for detecting the presence, absence, and/or quantity of a target nucleic acid and/or protein described herein. In some embodiments, the kit comprises the compositions (e.g., primers, probes, antibodies) described herein. The disclosure provides kits suitable for assays such as enzyme-linked immunosorbent assay (ELISA), single-molecular array (Simoa), PCR, and qPCR. The exact nature of the components configured in the kit depends on its intended purpose. For example, some kits can be configured for the purpose of treating a disease or condition disclosed herein in a subject. In some embodiments, the kit can be configured particularly for the purpose of treating mammalian subjects. In some embodiments, the kit can be configured particularly for the purpose of treating non-human subjects. In further embodiments, the kit can be configured for veterinary applications, treating subjects such as, but not limited to, farm animals, domestic animals, and laboratory animals. In some embodiments, the kit can be configured to select a subject for a therapeutic agent, such as those disclosed herein. In some embodiments, the kit is configured to select a subject for treatment for the viral infection or viral disease.

[0187] In some cases, instructions for use can be included in the kit. Optionally, the kit also contains other useful components, such as, diluents, buffers, pharmaceutically acceptable carriers, syringes, catheters, applicators, pipetting or measuring tools, bandaging materials or other useful paraphernalia. The materials or components assembled in the kit can be provided to the practitioner stored in any convenient and suitable ways that preserve their operability and utility. For example the components can be in dissolved, dehydrated, or lyophilized form; they can be provided at room, refrigerated or frozen temperatures. The components are typically contained in suitable packaging material(s). As employed herein, the phrase “packaging material” refers to one or more physical structures used to house the contents of the kit, such as compositions and the like. The packaging material can be constructed, for example, to provide a sterile, contaminant-free environment. The packaging materials employed in the kit are those customarily utilized in gene expression assays and in the administration of treatments. As used herein, the term “package” refers to a suitable solid matrix or material such as glass, plastic, paper, foil, and the like, capable of holding the individual kit components. Thus, for example, a package can be a glass vial or prefilled syringes used to contain suitable quantities of the pharmaceutical composition. The packaging material has an external label which indicates the contents and/or purpose of the kit and its components.

### EXAMPLES

[0188] The following illustrative examples are representative of embodiments of the stimulation, systems, and methods described herein and are not meant to be limiting in any way.

### Example 1. Genetically Modified Pig Exhibited Enhanced Resistance to ASFV

[0189] A genetically modified pig comprising knockouts of three endogenous genes (CMAH, GGTA1, and B4GALNT2) was examined for resistance to ASFV. Pig alveolar macrophages were isolated from the genetically modified triple-knockout pig (the 3KO group) and an unmodified control (WT group). The pig alveolar macrophages were seeded on poly-lysine coated plates and subsequently challenged with ASFV infection at various dilutions. After ASFV infection, the supernatants and cell pellets were harvested and examined for ASFV viral replications. FIG. 1A illustrates that on day 2 with reduced viral titer (10⁻²), ASFV replication was significantly reduced in the 3KO group compared to the WT control group. ASFV viral copy number in supernatants and alveolar macrophage cell pellets was measured by qPCR. FIG. 1B illustrates that the supernatants obtained from the 3KO group displayed lower ASFV viral copy number across 72 hours. FIG. 1B also illustrates that the 3KO group displayed a delayed phase of infection. FIG. 1C illustrates that the alveolar macrophage cell pellets obtained from the 3KO group had lower ASFV accumulation compared to the alveolar macrophage cell pellets obtained from the WT control group. Collectively, FIG. 1 illustrates that the genetically modified pig comprising CMAH knockout, GGTA1 knockout, and B4GALNT2 knockout exhibited enhanced resistance to ASFV compared to a WT control.

### Example 2. Genetically Modifying an Endogenous RELA Gene

[0190] To enhance resistance to viral infection caused by ASFV, the endogenous RELA gene was genetically modified in a pig. FIG. 2A, upper panel illustrates a locus (exon 13) into which a modified RELA allele was introduced via CRISPR/Cas9-guided homologous recombination. The modified RELA allele corresponded to ASFV-resistant warthog RELA allele and was flanked by 1.5 kb homology arms on both 5′ and 3′ ends (e.g. a first 1.5 kb homology arm followed by the modified allele followed by a second 1.5 kb homology arm.) The bottom panel of FIG. 2A illustrates guide nucleic acid (gRNA) targeting and binding sites for gRNA 1 and gRNA 2. gRNA target sites in donor plasmid were changed to synonymous codons. FIG. 2B illustrates screening of candidate clones with biallelic modified RELA knockin. PCR products shown in the agarose gel corresponded to the presence of the knockin RELA allele. FIG. 2C illustrates Sanger sequencing results obtained from two piglets born with the knockin of the modified RELA allele. The chromatograms show changes of three nucleotides, A1342G, T1453C, and T1591, confirming the presence of the knockin RELA. Nucleotide change A1342G results in an amino acid change T448A. Nucleotide change T1453C results in an amino acid change S485P. Nucleotide change T1591C results in an amino acid change S531P. The two resulting piglets comprised RELA alleles that corresponded to the warthog RELA sequence, which conferred resistance to infection caused by ASFV.

### Example 3. Targeting Multiple Regions of ASFV Viral Genome for Cleavage and Degradation

[0191] To effectively combat viral infection, guide nucleic acids (gRNAs) were designed for multiplex targeting of the viral genome. Such multiplexing reduces the possibility of the viral genome escaping from cleavage due to mutations in the viral genome. The gRNAs were also designed to avoid targeting and binding of the genomic sequences of the host cell. Additional design criteria included targeting an ASFV coding region and conserved region. The gRNAs were designed to be recognized by Cas9 from Streptococcus pyogenes, which recognized the PAM sequence 5′-NGG-3′ (where “N” could be any nucleotide base) as part of the gRNA. Targets with GC content between 20˜80% were prioritized; homopolymers of U nucleotides were avoided; and off-target cleavage with up to two mismatches to the genome of the host cell were avoided.

[0192] gRNAs were designed to target the sequences shown in Table 3. SEQ ID NO: 6 is the nucleic acid sequence of ASFV genome. SEQ ID NO: 7 is the complementary nucleic acid sequence for SEQ ID NO: 6. Table 4 lists the gRNAs that were designed based on the criteria described herein and target the nucleic acid sequences of the ASFV viral genomes of Table 3.

[0193] FIG. 3A illustrates how 6 gRNAs chosen from Table 4 or Table 5 are multiplexed to target at least 13 regions of the ASFV viral genome. Two of the six gRNA's each target up to 5 regions of the ASFV viral genome. The gRNAs also target both strands of the ASFV genome. Table 5 lists the gRNAs selected from Table 4 that could be multiplexed. By administering the gRNAs as part of the composition or pharmaceutical composition described herein, the gRNAs could be complexed with Cas9 to targeted and cleave multiple regions of the ASFV genome, thus conferring ASFV resistance or treating ASFV infection. As shown in FIG. 3B, the gRNA, when complexed with CRISPR/Cas9, digested PCR products of ASFV genome in an in vitro digestion assay.

[0194] FIG. 3C illustrates inhibition of ASFV in edited COS-7 cells with stable anti-ASFV CRISPR/Cas9 expression. Upper left panel summarizes the cells lines, Cas9 constructs, and sgRNA promoters described herein. Upper right panel of FIG. 3C illustrates the amount of ASFV DNA detected in supernatant from multiple cell lines as determined from qPCR across five days (DO, D1, D2, D3, D4, and D5). Lower left panel of FIG. 3C illustrates the amount of ASFV DNA detected in both supernatant and cell lysate from multiple cell lines as determined from qPCR across five days (DO, D1, D2, D3, D4, and D5). Lower right panel of FIG. 3C illustrates the level of inhibition positively correlated with Cas9 expression level. The inhibition was more related to Cas9 expression, while less related to the edit type. As shown in FIG. 3C, stable ASFV DNA and Cas9 expression were maintained after purification and adaptation. Also shown in FIG. 3C, EF1α promoter driven expression of sgRNA array was increased compared to U6 promoter. However, in non-NLS-Cas9, U6 promoter was better to drive the expression of sgRNA array than EF1α promoter. FIG. 3D illustrates relative viral titer of replications between samples and between qPCR.

[0195] To further confirm the efficacy of multiplexing gRNAs in guiding the CRISPR/Cas9 to target and cleave ASFV genome, a CRISPR transgene cassette was introduced into COS7 cells. FIG. 3E upper panel illustrates Cas9 expression in COS7 cell clones, where FY were clones comprising CRISPR vector with 6 gRNAs (SEQ ID NOS: 10001, 10002, 10433, 10848, 12318, and 12266) and FZ were clones comprising CRISPR vector without gRNAs. FIG. 3E lower panel shows how the Cas9 expression shown in the upper panel positively correlated with resistance to ASFV. High expression level of Cas9 (FY10), combined with the 6 gRNAs, inhibited ASFV replication as determined by two viral titers. There was no ASFV inhibition observed in FY clones. FIG. 3F upper panel illustrates the Cas9 expression levels in various COS7 clones. COS7 was the control without the CRISPR/Cas9 transgene cassette. FY10 and FY12 were clones comprising the CRISPR vector with the 6 gRNAs (SEQ ID NOS: 10001, 10002, 10433, 10848, 12318, and 12266) and with an U6 promoter driving the expressions of the 6 gRNAs. FZ was the clone comprising the CRISPR vector without the gRNAs. GC17 and GC49 were clones comprising the CRISPR vector with the same 6 gRNAs and with an EF1α promoter driving the expressions of the 6 gRNA. FIG. 3F lower panel illustrates a time course experiment, where the clones were infected by ASFV over four days. ASFV accumulation was determined by performing qPCR on cell lysates of the clones. COS7 control cells were infected by a 10-fold dilution of ASFV. As seen in FIG. 3F, GC49 and FY10, clones with higher Cas9 expression combined with the 6 gRNAs, had lower ASFV accumulation. Clones with lower Cas9 expression (FY12 and GC17) or without expression of the 6 gRNAs (FZ12) had increased ASFV accumulation. FIG. 3 illustrates that targeting the ASFV genome using multiplexed gRNAs and CRISPR/Cas9 cleaved ASFV's viral genome and reduced ASFV accumulation in cells, thus conferring enhanced resistance to infection caused by ASFV.

### Example 4. Insertion of Construct in Pig Fibroblast Cell

[0196] Primary pig fibroblasts isolated from large white pig ear were cultured to 40% confluence, and dissociated from the culture dish by TrypLE™ Express Enzyme (Thermo Fisher, Cat #12604039). 4×10⁵ cells were electroporated with 250 ng of plasmid encoding PiggyBac transposase and 250 ng of donor plasmid with the transgenes flanked by ITR sequences recognized by PiggyBac transposase, using Neon Transfection System (Thermo Fisher, Cat #MPK5000). The transgenes have a chance to be integrated into the genomic DNA of the transfected cells via PiggyBac-mediated random integration. Transfected cells were single cell sorted and grown to single cell clones. Cell clones carrying the transgenes were detected by genomic DNA extraction and PCR to check the presence of Cas9 gene sequence and used for further experiments.

[0197] FIG. 4 illustrate an exemplary experiment demonstrating the insertion of one of the constructs described herein (pBv1-U6) into genomic DNA of viable pigs. FIG. 4A shows exemplary multiplexing self-cleaving ribozymes to link the different gRNA sequences together to express multiple gRNA sequences under a single promoter. Dash lines indicate sites of self-cleavage. FIG. 4B shows exemplary vector designs for expressing multiple gRNAs and nucleic acid-guided nuclease (e.g. Cas9). The nucleic acid-guided nuclease in these vectors can be fused to a nuclear localization sequence (NLS). In some cases, the nucleic acid-guided nuclease is without the NLS (e.g. pBv2-EF and pBv2-U6 vectors). FIG. 4C illustrates designs for the vectors and gRNA ribozyme described herein.

[0198] FIG. 5A illustrates the presence of the fragment of the Cas9 transgene construct (pBv1-U6) inserted at genomic DNA level in the cloned transgenic pigs. 100 ng of genomic DNA obtained from transgenic pigs P07, P09, P10, P11, and P13 all showed the amplification of the fragment of the transgene. WT: wild type large white pig genomic DNA. PC: positive control (plasmid carrying transgene). FIG. 5B illustrates expression of Cas9 transgene by RT-qPCR. Pig fibroblasts were harvested from cloned transgenic pigs, and RNA was isolated from the fibroblasts. Reverse transcription was carried out to obtain cDNA. PCR were performed using cDNA as template to identify proper expression of Cas9 transgene. 100 ng cDNA from transgenic pig fibroblast (P10 and P12) or from wild type pig fibroblast. Cas9 expression was detected by qPCR of cDNA from transgenic pig fibroblasts. FIG. 5C illustrates Cas9/sgRNA expression in the transgenic pig fibroblasts with active cutting ability using reporter plasmid detecting homology-directed repair (HDR). Reporter plasmid was used for reporting cutting of an ASFV sgRNA target site and generating a positive signal of EGFP (FITC channel) through homology-directed repair to reconstitute a functional EGFP copy. The use of the report plasmid can mimic the process of how ASFV can be cut after entering the cells of the transgenic pigs, confirming Cas9/sgRNA function of cutting dsDNA with ASFV sgRNA target site in the transgenic pig fibroblasts. HDR-reporter plasmid were transfected into fibroblasts of transgenic pigs P09 and P10. FACS were performed 48 hours after transfection to detect the expression of EGFP. Cas9/sgRNA proper cutting ability was detected in both P09 and P10 pig fibroblasts.

Lengthy table referenced here
US20230348910A1-20231102-T00001
Please refer to the end of the specification for access instructions.

Lengthy table referenced here
US20230348910A1-20231102-T00002
Please refer to the end of the specification for access instructions.

Lengthy table referenced here
US20230348910A1-20231102-T00003
Please refer to the end of the specification for access instructions.

[0199] While the foregoing disclosure has been described in some detail for purposes of clarity and understanding, it will be clear to one skilled in the art from a reading of this disclosure that various changes in form and detail can be made without departing from the true scope of the disclosure. For example, all the techniques and apparatus described above can be used in various combinations. All publications, patents, patent applications, and/or other documents cited in this application are incorporated by reference in their entirety for all purposes to the same extent as if each individual publication, patent, patent application, and/or other document were individually and separately indicated to be incorporated by reference for all purposes.

LENGTHY TABLES
The patent application contains a lengthy table section. A copy of the table is available in electronic form from the USPTO web site (https://seqdata.uspto.gov/?pageRequest=docDetail&DocID=US20230348910A1). An electronic copy of the table will also be available from the USPTO upon request and payment of the fee set forth in 37 CFR 1.19(b)(3).

The application's sequence listing, which the Patent Office published only in electronic form, follows.

SEQUENCE LISTING (33301 sequences)

SEQ ID NO: 1 - DNA, 1662 bp, unidentified
  source 1..1662: mol_type = unassigned DNA; note = Endogenous RELA sequence
atggacgacctcttccccctcatcttcccctcggagccggccccggcctcgggcccctatgtggagatcatcgagcagcccaagcagcggggcatgcgcttccgctacaagtgcgagggccgctcagccggcagtatcccgggcgagaggagcacggataccaccaagacccaccccaccatcaagatcaatggctacacggggccagggacagtgcgcatctccctggtcaccaaggacccccctcaccggcctcacccccatgagctcgtggggaaagactgccgggatggcttctatgaggctgagctctgcccagaccgctgcatccacagcttccagaacctggggatccagtgtgtaaagaagcgggacctggaacaggccatcaatcagcgcatccagaccaacaacaaccccttccaagttcccatagaagagcagcgcggggactacgacctgaatgctgtgcggctctgcttccaggtgacagtgcgggacccagcaggcaggcccctccgcctgccgcctgtcctctctcaccccatctttgacaaccgtgcccccaacactgcagagctcaagatctgccgggtgaatcggaactcggggagctgccttgggggcgatgagatcttcctgctgtgcgacaaggtgcagaaagaggacatcgaggtgtatttcacgggcccgggctgggaggcccgaggctccttttcacaagccgacgtgcaccgacaagtggccatcgtgttccggacgcctccctacgcggaccccagcctgcaggcccccgtgcgcgtctccatgcagctgcggcggccttcggatcgggagctcagcgagcccatggaattccagtacttgccagacacagatgaccggcaccggattgaggagaaacgcaaaaggacctatgagacctttaagagcatcatgaagaagagtcctttcaatggacccaccgacccccggcctgcaacccggcgcattgctgtgccttcccgcagctcagcttccgtccccaagccagctccccagccctatccctttacgccatctctcagcaccatcaactttgacgagttcacgcccatggcctttgcttctgggcagatcccaggccagacctcagccttggccccagcccctgccccagtcctggtccaggccccagccccggccccagccccagccatggcatcagctctggcccaggccccagcccctgtccccgtcctagcccccggccttgctcaggctgtggccccgcctgcccctaaaaccaaccaggctggggaagggacactgacagaggccctgctgcagctgcagtttgatactgatgaggacctgggggccctgctcggcaataacactgacccgaccgtgttcacggacctggcatccgtcgacaactctgagtttcagcagctgctgaaccagggtgtatccatgcccccccacacagctgagcccatgctgatggagtaccctgaggctataactcgcttggtgacagggtcccagagaccccctgacccagctcccactcccctgggggcctctgggctcaccaacggtctcctctcgggggacgaagacttctcctccattgcggacatggacttctcagcccttctgagtcagatcagctcctaa

SEQ ID NO: 2 - protein, 553 aa, unidentified
  source 1..553: note = Endogenous RELA sequence
MDDLFPLIFPSEPAPASGPYVEIIEQPKQRGMRFRYKCEGRSAGSIPGERSTDTTKTHPTIKINGYTGPGTVRISLVTKDPPHRPHPHELVGKDCRDGFYEAELCPDRCIHSFQNLGIQCVKKRDLEQAINQRIQTNNNPFQVPIEEQRGDYDLNAVRLCFQVTVRDPAGRPLRLPPVLSHPIFDNRAPNTAELKICRVNRNSGSCLGGDEIFLLCDKVQKEDIEVYFTGPGWEARGSFSQADVHRQVAIVFRTPPYADPSLQAPVRVSMQLRRPSDRELSEPMEFQYLPDTDDRHRIEEKRKRTYETFKSIMKKSPFNGPTDPRPATRRIAVPSRSSASVPKPAPQPYPFTPSLSTINFDEFTPMAFASGQIPGQTSALAPAPAPVLVQAPAPAPAPAMASALAQAPAPVPVLAPGLAQAVAPPAPKTNQAGEGTLTEALLQLQFDTDEDLGALLGNNTDPTVFTDLASVDNSEFQQLLNQGVSMPPHTAEPMLMEYPEAITRLVTGSQRPPDPAPTPLGASGLTNGLLSGDEDFSSIADMDFSALLSQISS

SEQ ID NO: 3 - RNA, 1656 nt, Phacochoerus africanus
  source 1..1656: mol_type = mRNA
gacctcttccccctcatcttcccctcggagccggccccggcctcaggcccctatgtggagatcatcgagcagcccaagcagcggggcatgcgcttccgctacaagtgtgagggccgctcagccggcagtatcccgggcgagaggagcacggataccaccaagacccaccccaccatcaagatcaatggctacacagggccagggacagtgcgcatctccctggtcactaaggacccccctcaccggcctcacccccatgagctcgtggggaaagactgccgggatggcttctatgaggctgagctctgcccggaccgctgcatccacagcttccagaacctggggatccagtgtgtaaagaagcgggacctggaacaggccatcaatcagcgcatccagaccaacaataaccccttccaagttcccatagaagagcagcgcggggactacgacctgaatgctgtgcggctctgcttccaggtgacagtgcgggacccagcaggcaggcccctccgcctgccgcctgtcctctctcaccccatctttgacaaccgtgcccccaacactgcagagctcaagatctgtcgggtgaatcggaactccgggagctgccttgggggcgatgagatcttcctgctgtgcgacaaggtgcagaaagaggacatcgaggtgtatttcacgggcccgggctgggaggcccgaggctccttttcacaagccgacgtgcaccgacaagtggccatcgtgttccggacgcctccctacgcggaccccagcctgcaggcccccgtgcgcgtctccatgcagctgcggcggccttcggatcgggagctcagcgagcccatggaattccagtacttgccagacacagatgaccggcaccggattgaggagaaacgcaaaaggacctatgagacctttaagagcatcatgaagaagagtcctttcaacggacccaccgacccccggcctgcaacccggcgcattgctgtgccttcccgcagctcagcttccgtccccaagccagctccccagccctatccctttacgccatctctcagcaccatcaactttgacgagttcacgcccatggcctttgcttctgggcagatcccaggccagacctcagccttggccccagcccctgccccagtcctggtccaggccccagccccggccccagccccagccatggcatcagctctggcccaggccccagcccctgtccctgtcctagcccccggccttgctcaggctgtggccccgcctgcccctaaaaccaaccaggctggggaagggacactgacagaggccctgctgcagctgcagtttgatgctgatgaggacctgggggccctgctcggcaataacactgacccgaccgtgttcacggacctggcatccgtcgacaactctgagtttcagcagctgctgaaccagggtgtacccatgcccccccacacagctgagcccatgctgatggagtaccctgaggctataactcgcttggtgacagggtcccagagaccccctgacccagctcccactcccctgggggcctctgggctcaccaacggtctcctcccgggggacgaagacttctcctccattgcggacatggacttctcagcccttctgagtcagatcagctcctaa

SEQ ID NO: 4 - protein, 551 aa, Phacochoerus africanus
DLFPLIFPSEPAPASGPYVEIIEQPKQRGMRFRYKCEGRSAGSIPGERSTDTTKTHPTIKINGYTGPGTVRISLVTKDPPHRPHPHELVGKDCRDGFYEAELCPDRCIHSFQNLGIQCVKKRDLEQAINQRIQTNNNPFQVPIEEQRGDYDLNAVRLCFQVTVRDPAGRPLRLPPVLSHPIFDNRAPNTAELKICRVNRNSGSCLGGDEIFLLCDKVQKEDIEVYFTGPGWEARGSFSQADVHRQVAIVFRTPPYADPSLQAPVRVSMQLRRPSDRELSEPMEFQYLPDTDDRHRIEEKRKRTYETFKSIMKKSPFNGPTDPRPATRRIAVPSRSSASVPKPAPQPYPFTPSLSTINFDEFTPMAFASGQIPGQTSALAPAPAPVLVQAPAPAPAPAMASALAQAPAPVPVLAPGLAQAVAPPAPKTNQAGEGTLTEALLQLQFDADEDLGALLGNNTDPTVFTDLASVDNSEFQQLLNQGVPMPPHTAEPMLMEYPEAITRLVTGSQRPPDPAPTPLGASGLTNGLLPGDEDFSSIADMDFSALLSQISS

SEQ ID NO: 5 - RNA, 402 nt, Phacochoerus africanus
  source 1..402: mol_type = mRNA
gctgtggccccgcctgcaccgaagacgaatcaagcaggtgaagggacactgacagaggccctgctgcagctgcagtttgatgctgatgaggacctgggggccctgctcggcaataacactgacccgaccgtgttcacggacctggcatccgtcgacaactctgagtttcagcagctgctgaaccagggtgtacccatgcccccccacacagctgagcccatgctgatggagtaccctgaggctataactcgcttggtgacagggtcccagagaccccctgacccagctcccactcccctgggggcctctgggctcaccaacggtctcctcccgggggacgaagacttctcatctatagctgatatggatttctcagcccttctgagtcagatcagctcctaa

SEQ ID NO: 6 - DNA, 32763 bp, African swine fever virus
  source 1..32763: mol_type = genomic DNA
tataagtatattatatattttataattttatatatataaagcaggtacaattttattatatagtgcagatcttttttgtgaaaaaaaaataattatttttttgcgcgccggaataattattttttttgcgcggaaatatttttgcagtggcgattgatttttttttcagttgtctgcccgtggcggaataattattttttcgccggaaagcattttgtagtttcacaagatgcagaatttggcgggccggaataattattttttcgccggaaagtattttgtgtaccgtagtttcactagatttcgcggtgcataccggtgggcgataggtattaaaataatttgtactgctgtaggcgttaaagattaaaattattattactgctgtaggcgttaaacattaaacttattactactgctataggcgttaaacattaaaattattactactgttgtaggcgttaaacattaaaattattactactgctgtaggcgtcaaagattaaaattattactactgctgtaggcgttaaacattaaacttattactactgctataggcgttaaacattaaaattattactactgttgtaggcgtcaaagattaaaattattactactgctgtaggcgttaaacattaaaattattactactgctgtaggcgttaaacattaaaattattactactgttgtaggcgttaaacattaaaattattactactgttgtaggcgtcaaagattaaaattattactactgctgtaggcgttaaacattaaaattattactactgctgtaggcgttaaacattaaaattattactactgttgtaggcgttaaacattaaaattattactactgctgtaggcgtcaaagattaaaattattactactgctgtaggcgttaaacattaaacttattactactgctataggcgttaaacattaaacttattactactgctataggcgttaaacattaaaattattactactgttgtaggcgtcaaagattaaaattattactactgctgtaggcgttaaacattaaaattattactactgctgtaggcgttaaacattaaaattattactactgttgtaggcgttaaacattaaaattattactactgttgtaggcgtcaaagattaaaattattactactgctgtaggcgttaaacattaaaattattactactgctgtaggcgttaaacattaaaattattactactgttgtaggcgttaaacattaaaattattactactgctgtaggcgtcaaagattaaaattattactactgctgtaggcgttaaacattaaacttattactactgctataggcgttaaacattaaaattattactactgttgtaggcgtcaaagattaaaattattactactgctgtaggcgttaaacattaaaattattactactgctgtaggcgttaaacattattactgctgtaggcgtagctaaattttaatgttttttcgtaaaaaatcgccagtcacaaaaaaaagcagccatgtatatctgtgatgtttggtgttttatctacatgctattggcattcctgatattcatgttaaagtgctatactataaccatcttatgtgggctctttatacatcttattggcaggaggcccactatatatatcctgttaagtagtttagctgtatactatttaatgtttttcgcttgatcaagaaatatacaaaaatctaagtgcaccattttatgggcatcaatcaatcacagcattctatgggcgtgaatcaatcacaccattttatgggcgtcaatcaatcacaccattttatgggcatcaatcaatcacagcattctatgggcgtgaatcaacacattattggggacagctacctgatatcgtgtatggtggtggcaccgtgttgtttgaaggcgtgtatggtattagcgccatgttgtttgaaggcgtgtatggtattagcgccatgttgtttgaaggcagcgcgttagtaacaacgttttttttcgtatgacaacagatatgtataagatagcaaattaatgctattgtcatcaatgagaaacataagtagatatagacctgcctcttggtagtccaatgatccatgttgcacctaaaaatcccaaaaaaaaacattaagttttggagggtaagattggtttttcaccattggtaaagattattattctaaatgtttaccccatagatgtgaaacaatgattcttcatatattaacatattttttgacttatacttttcttcatctagtaaggcgttaattttttccggatctgtcgtttttattgataaaagagaagagtctggactgtaatttttaaataataagatatttattaatatccaattattcgtttgactcgctatttccatgctctcttcaaacgcatcagctcctaaatctatacaaaggaataagttaccttcacaaaaattcattaccgaggtaatcattgcccgattaatgtcagctcccaacatacaacaataatatatagttgtataattacaatcatacatacaggccaactgcatcatttcatcaatgtctatattcgtcttctctttgttataaatttcatgaaggtcaaagacgttgttataagcaaccccacatattaaccgccaatctttaaaatgactatatcgttgataaaaatattggatggcttcagtaagcttatatagtatcgccatactataccaatacctagttagcatttcgttgaatgaaatattatccaatgtaaagttgattgataatgtatctagttcaccaaaaattcttaatttcagttgagcattatttaggaataggggattatcagataataattcatggcatagaataatattactgctagttttaacatactgtacattataaaatatttctaaaattttattttcactcaaagctttcctcgcacctaacttttggcataggtcctgggtgcactccatattgacagtaaccaacccaaagctgatgtctgcaccccattcggtaaacagctctattaaaccatgattgttttcctgtacagccttcattaatgcaacatttaatgttaaaccatgtttaaaacttgctgtttttattaatatttgtttatctatacaagtatgatgaatcgtaattggggcttcatgccaccacaaaccacaacgctctaaaatacaataatcatctttgaacacaggctgtgtagctagtacttttttagtaagtgcttgtaaagtagatggcatcttctatctgcaaaataattatttccgaaaaaaaaatcaaattaaaatactaaattctatttttttttaataaagcctgtaaattatataataaatctcgcccaccgtattattttcggacacaactttttatacctcattatatttttagatctatagttttttaacaaggcattaattttttctggatctgtcgtttttaaagataaaagagagacgtttgaattataaaaatctttaaatgataatatttctactaatatatcatgattcttttgttttgctaattctaagctctcttcgaaagcattagctcctaaatctatacaaaagaacaagttattagtataaaagttttttaccgaagtaaccattgcccgattgatgttagcccctaatacaaaacaatagaaaatggttaaaaaattgctatctctcatacaggccagatacatcatttcatcaatattcatatcaaccttttttatatgatatatttcatgaagatcagacacgttattaaaagaaagcccacatattagccgccaatctttaaaatgtctataacgttgataaaaatattggatagcttcagttaggtgatatcgtaccgccatactataccataacctagctagcatttcgttcaatgttatttcattcaatataaagttgatcgatatcttctctagaaaacaacaaattattatttttaattcctctatattctggaaaaggggattattagataacaatttatggcatagaataatattactactagttttaatacgatgtattttataaaatatttgtacaatatccatttcattcaaaatttttgcgcctaactcccggcagaaattccaagtatgctccgtattgacagtgactaagctagagttgatgtctgcaccccattcggtaaacaactctattagatcatagttgttttcctgcacagctttcattaatgcgagatttaactctaaaccatctttaaaaattgctgattttatcatcaattgattatcctcattagtagaaaacataattggagctccatgccaccacaaaccacaatatttcaaaataaagtagtgatttttggatatgtgctgtgtggccagtatttttttagcaagagcctgcagagaaagtggagtagacatttttttttgcaaaatggtttaagttttaatgttttcaagaatacagattggataaattaggttgacattagtaacagaaagtattcaatattatgtagacctataaaaaatgagaccctccaaaaaataataaacaacacaaaaaaaatatgtttaatattaaaatgacaatttctacattgcttattgctcttattatactagttattattattttagtcgtatttttatattataaaaaacaacaaccaccaaaaaaggtctgtaaagtagataaagattgtggtagtggagagcattgtgttcgtggaacatgcagcacattgagctgcttagacgctgtaaaaatggacaaacgaaatattaagatagattctaagatttcctcatgtgaattcactcccaatttttaccgttttacggatactgctgccgatgagcagcaagaatttggaaaaacacggcatcctataaaaataactccatctccaagtgaatcccatagcccccaagaggtgtgtgaaaaatattgttcatggggaaccgatgactgtacaggttgggaatatgttggtgatgaaaaggagggaacatgttatgtatataataatccacatcacccggttcttaaatatggtaaggatcacatcatagccttacctagaaatcataaacatgcataaataaatacattaggctcatcgtatcctttttaaaatccataaatattcgtttgatatatgctgaaatttttataaaaaaaaataactatttcttataaatcatctagaaatagtcctcgttttgatcggtttatatcttataatattgtgcatcgatgcacaactgctttttttggtccttctggaacatcattatattttctttcattaatataccattcagatgtaaatgttgaataatttttatggcaacaatctaccactgaattatatttagtaacatctaatacatcgcttgttttatcaggctcagctttataatcttgataatttttgttatcagcttctaaagctccatcattatttttcaaagaagtgtccataatcatgtttggtaaaaacactttaagttttaatatgatatttaaaatggttgttatataaatttaccgcttacaggtaatctttattcagtatcataaactatacttttgatggttcagtattctgtaaatcggtattttgtgaatcagtacatttattatcattaatatttttaggctgattttccaatgttttattgttgcaatgagcctgctcctcctttaacggggaagtgtctgttggagtcatctgtttaggaagagtatcatccatatctattatgaagaaaatatataaatattgatatacaatcaaaaatatttttgatcacgtctttgttatctatcgatattgttgataacgtcttgaataacctacatcatttttttacataaaaaaatagatataatttttattatatctcaattatcttaagataattatcaaagtaactattttaaagataattatcaatacaacaaatatcataagctaacatatttttcgaataatagttttttagtaaagtattaatcttttcaggattagtttcttttgataataagataggattcgctttataaatttttaaagataatatattcacaatgatagaataaccgtatatatctgctaatgtcttactgtgttcaataacattagcccctaaatccatacaaaagaacatattttcaatacaaaagttttttaccgagattaacattgctcgattagcgttggctcccaatgcaaaacagtagtaaatggtcaaaaaattattgtcgcgcatacaggccagctccatcattttattaatactcatatgaattttcgttgtgttacatatttcatgaaggtcaaacacattgttgaaagaaagtgcacaaattaatcgccattcatcaaaatgcctgtattcttgacagaaatattgaatagcttctttaagattatattttaccgctatgccataccaatatttggttagcatctcactaaatgagatctcatttaacatagaatttgttggtaaatccttcaactcccaataaataatcatccttaaatccaccatgtttacattttgtaaaaaagggttattagaaaataattcatgacacaaaatgacattactacttgttattttacactttgtttcaaagaaaaatcgtaaaatttcacttgtctcaagctcttctttagcccccaattttcggcataggtttcgagtatgctcgttattaataaaaagtaacccataattaatatttgcgccccattcagtaaacaacatgattagatcttcattgttttccttaactgccaataccaatgcagtattaagctttataccctctttaaagcataatgtccttatcattatttgattatcatcatctatataaattgagataggagcttcatgccaccataaaccacaacgctctaaaatataataatcatctttagatacgtgttgcgtggccaatgcccttttagcaagtgcttgtaaagtcgatggctgcatgtttattttgttaaaaaaaaatcaaattatcgggtaaacataaggatcaacccgtagttaatatttgcagtgacatttttaacaatgaattatgataaaaaaataattcatgactatctatcatggaacccatctttaacattaaagaaaaaccagatcatcatttttttttgttgtattaggacttcttcaaattattacccacattttatctaaaaaaataaaactacataatatcttgtttcttcatcaaattatcataccatttaaagtgtgtaggttgggaacattccataatatgggtattaaagtgtttatatattttttcataggaacatttatttggcagatgtgttgtccaacaatcatatctaataaaatcattttcacctatggggggatgattcttaaaagccttattcttacagatgccattttgacagtcccagcaaaagttacaatattttccatgagtacaccaatgttcaagctctcttttgggaggaatgctgccaattttatgttttttatcttctaactctccatacagcatcagttgggaaagcagaaaggagattaccaggaagaccagcaaatacataacagtctgtaaactacgtttgcgaatgtaattcacagctaaaatacatcccgcaagataaaatccataggttaacaatttctgccattttcgtatatcagcctcatgcctttcatggtttatgtgttgtggacattctgttcggtacgttttatgaggctttatagaagttatgtagtagatacagaaatcattgcgacgataaatactgcagttagctatatagttattttcaagaatgggagaatggtttttaaaagccttgttcctacagataccatcttgacagtcccaacagaatctacaatggtttgcataagtgcaccagtatccaagctccttttcaggtggggtacttgttcgttccaggggctctatctcatatgtataaagaagagttggaatagatagtagggtgaatatttgcagaccaagcatggctacttgtgaacaagtggctgctcgtcagcaaatagctgcttgtgggtaagccaataaatgggccatacccttgaaaggagaattcagtttgataaaaaaaataacgagttttctaataacccggtcaagcatttattaaatgagtggcatcagatgtctgcatcgtgcattctacttggaaaatgggcccatctctaatatatttacactgacggtgaatcatacagtgttccatgggatagctatgctcctgtacagaagacatatctttaagaactttattcttacaaagaccatcttgacaagtccagcaaaaccgacaatttttcacatattgacaccagtatcttagctcctcttccaggagattgtcggtcgaaaaaccctgtagactagttagaccagctagcagcaagccgaggtaactaaagaacctcattgtagtgttatattacgaaaaaatatgttaaaatttggaaaaaaaagccctttttatagatctggaaaaaaattttcacaaatctaattaaaatcctcacagatcttccttttcataaattttccttcccaatcggtgtggacgattgtgaggtactggattagaacaatccataacatggtaatgcccatttccttcactatatgtgcactggttataccagcgagaaacctcacaagatgtcaaataactgttctcaataatcaatggcatgctctcattcaccttgttcttgcaaattccatgtgcacattcccagcaaaacttgcagctttccatgtaagtacaccagtatccaagttcttcttgtggaggattatccgttgaacgaagatgccctcctgcctgagtaggtagtcctaagacctgattggccagcaggccaagaattcccaagaagatcaccaacattgctacggctggctgaacagctgaccgaatagctagccaattagcaaaccaagtgactcgcccctctactcttaatatgaaaatttaagattcgattcagcatttttcctgtgttttacagagaaaagatatttttagtctatgaatgcacatggttccgcacattaaaaaaataaattatttatttagccagcgggaaactatacatggatgcacatactcattttcaagaattgttgtatttcccaacttattcacacaaaggccattttgacagtcccagcaaaactggcaacattccatgtaagtgcaccaatattcaagttcattctctgaaggattttccgttggatgaagttgtccaacgagctggcttgagacctggttggccagaaggccaagaattcccaagaagattactaacattgctacggctggctgaacagctgctagatagctagctaattagcaaaccaagtgacgccctctctattctttatatgatgatttaagattgagtccaacatttttccaacgttttacaggaaaaaggtatttttaactatggaattaatcttaacccactatttagaaaaaaataaaagacacatttatttaattttagctgaggcaaatttgctgacaaactctagagttcatcttttttccattccttcctgaagtatttgtaaggattccaagaccatggctgagaacaattcatggtatggtagatacctttatctaaatcatacatacatttatccagccaacgggacaccagacatgctttcacatactcattcttataaatggccgacccatctattttgtttatacaagtgccatcttggcagtcccagcaaaattgacaactttccatgtaggcgcaccagtattcgagttcttcctctggaggatcctctgttggtcgaagttgtccaacgagttgacttgaaacctggctggccagaaggccaagaattcccaaaaagatcaccaacattgctacggctggctgaacagctgactgaatagctagccaattagcaatccactgtacttttcataagatcatttaagattcggtcgacattttttcaatagtttgctaggaaaaaatttttaatcttatagattcacaccacttcattctcatgcttaggaaaaaataaaccaaatcttacaatgtatctggatctaatgagaaactagaattcatcttttttcaactcctttctggaatgtttatcctttttccactccttccttgcaattttataaggattccagggctttgggtccaccacaatccaagctgctgtaaaataaaaatatcatcctcatgatattctgaaaaagccttgttttctatcaagactttttttgtaagaacctgtaaagaattcatcgtattatcatggataaaagcagtaaatgtaatcaattataaaattgacttattgaagagaaatgttaaatgagtgaaatcggtgtttacgatgatgtgcatgatcatacgaagaaacaggttcactggtgtccatgatcaaaatttaatattcaacgtaaaaagtacagacgttaactgtttagtttaaacattagtttacactaaaggttaatctttagattaagcctagtcaacaatgtttgacatttcttccattcttatacggggggggggggtcttaatcgttgtaatactattgttgtggattgttgaacataatgaagactttatagatgctaaatcaatgaattataataatcaaactgtttaatgtgagctataaatcttataaaagtatttatcaaaatttatttttttttataaaaagtacaggaattaatcatttagtttaaactttagtttggctatttgagttaacgtagtttaatatttcttccatgcttatccaaaggggggggggggggtcttaatcgttctaatactattgttgtggattgttgaacataatgaaaactttatagatgcctaaaataattgaatctaaaaatagtagtatactttaatcaaaatttgatttctcataaaaaaggtacacatcattcatttaagtttcatgatgtttagttcattacttctacaattactgggggggggggtccctcatagctttagtattattgtggcttactgactattatgtagaagaattcatagaagcaacaatatatgttactaatgctacattgtaaattataaaatacatactaaactaatttcagtatttttttttgttcatataagttaaggtacaaaaatgattaaacactgcaaaaaaagaaaatcataatgctattatacatagtgatcatagtggcttgtatcatttctaaactagttccaaatgaatattgggcaatacatctatttttcatcattatgatttttatggtatatatgtatgaaaagttagatatacatcaaaaatatcagttctggaattatacgatgtcaggcttatctggacataacgtacaggtaatatgtaagtgttactaaatactatgaagtatctattttttttacaacaaaaaaaatagatgtaatcggttttatcatttaggtgtgtatttctttagcatctttctaagaattcattgtttagcggtataaaaacaatgaatgatcatcatattctatttaacaatctcctaaataaatgaacatctttttcattttaacatgatcaccaatagtcattttgcgaaaaggcatacatatgatcaatatcagacctacaatgaatgtttccataatatccctttatcgcaataattctatttttgcattccgatatctcatcatctgtgctattatatgtttccataactgtttcatcatcaaacataaatcctattaaataagcaaagcgctttaatcccggatagattttcaccatttttctaagagccgtgtatagcttgtaataaatggccagaaatatgcaataaagcgtagaaagagagtaatttttggcataaaaggttttgaaggtttgatgaatggctaaatcgcagataatataagatacgatattaaagcgcacctgttcacgcagatttgttgaaaacttcgtagaaagattcaacaaataaaaggttattaatagttgctcatcattctccttatacgacatcgtcagacgctctaagattttactactggacacatctgccacatgttgaacatttaaagcctgttcttcttctgtgttacgacaaaagagccgcgcatattcaggtgaagctccccaggataacaacgtccgtgtcacggctaaattttttttgacgatgactttcatcagaaataagtctttatttttgcattgatcactatgcgaatttgtatagttgacgccgttgcattgagtacattgatataatgttttgcaattccagcgtagccctaaatggtataaaaggactgtattttcgacgcaagcatgctgattaacgatgtttttgagacaacacgttgttaaggacaccatattgtctccaatttgttggataaaagtctttactaaaaaaataggtttttagttttaacaatcgagattttattatttggatatagcatcatcaaaaagatttatgttaaaatttaatttgtcttacaaaaagtacagattcaataattggtttaactatttagtttaactatttagttaaattacttggttagcaatgtttgagctttcttccattcttattcgagggggggggggggtcctaatagttttgatacttttgttgtggattgttgatgaaaactgtacagatgctaaagcaatggcatataatattaattgtactgtttaatgtgagtttataagtatgtatcaaaatttatttttttttataaaagtacagaaattaatgttagcttaaactttagtttagctatttgagttaatgatgtttaacctatcttccatgcttatcaggggggggggggtcctaattgttttacgttataaatttgatcaaaatttaatttcttataaaaaaggtacacatcaacattgctcatttaagtttcataatgtttgattcattacttcctacaattactgggggggggggtctttaatagcattaatattattatggtttgctgactatttggaatttatagaagcaaaaatagatacttttactaatagcagtgcattataagtgatcaaaatttaatatctcataaaaaaggtacacatcaacatcattcatttgtttcatgatgtttgattcattactttctacaatcactggggggggggtctctcatagctttagtattgctatggtttactaattattatgtagaatttataggagcagatatatatggtggtaattgtactctataagtttataaaaatttcagtatattttttttgttaatataacagaaatgatttaaattacaaaaaaaagagaatcatcatgctattatacattgttattatagtagcatatgtaagttataaattggttccaaaacaatattggccaatactcatgtttatggcttacatggtatatacccatgaaaaattagatataaatgaaagatccggattttggaaatatattatagcaaaactattcagatgccacggatgtgaaatatgtaagtgatattaaaaacataatacgaagtgtaataattgactattttttgttgaatggaaactgtttttgagtaatatgttgaacataatggtttttatagatgttaaatcatttgattgtagtaattgtactaaatgatgtgagatataaacctagttcaatcaaaatttaatttttttataaaaagctacagagtgttttattaaacgtagcttatttaaaaagttacacaatgttaaaatctctacttactttaattctttgtggggttttattaactttatccatattatggcttattacttaccatgtagaacttatagaagcaatagatgatttctacgactgaaatatagaatagttcattttctatttgtaaaataatgatttatattctctcctaaaaatacgatcgatcctttatatgctttgaaaacgaatattaacaacttgatttttttttctataaataaactataaatgaaaatagtaaaactcatagagtcttataagtgaacatccatcatgttactcaaacgttggactattaaaagatactccgtgtgcattattgcttttaatcagtatgattactttatacgaagccgctattaaaacgcttatcacacaccgaaaacagattttaaaacaccccgatagccgtgaaattttactagctttggggttgtactgggataaaactcatattcttgttaaatgtcgtgaatgtgggaaaatgagtcttaccggaaaacacagtacaaaatgtattaacattaattgtctacttattcttgccataaaaaaaaagaataagcgtatggttgataccttgataagaatgggtgcggatgtaacatatatacatcttttaaagaataagataaaactgtcatacaaccagctgtctatgcttaaaagcaactcgcagatttcgttgaaggagcttcatgctatatgctaccttttatatggtcggcttcccaaaaaaattaaacaagggatgcaactgtgtaaaacaatggcgggactatgtggtgaacttttatgagcatttttagctccgtaaatgtaatatatgtatataaaacaaatagataataccaaaatatattctatgtacataacatccggaaaattatttttttttctcatacccttaaatataaaaatattgggtttcttcactaaactttagaggtaaaaatttttctttgttttgcatcatcatgtatgggtttaggttatcccagggattgtttatttgaatatttcctaaataggaacacaacgccatgatcatatatctttcattctggtaagctttttgatacatcttcaaagatgccgtacctccgagtgtgtaacagcaaacaaacgtccgtacttttccatgggtcgcagcccattccattccgtagctcagcatcctttgctgtatttttttattcgctttataaaaaaagtatttcatccattccacgttctcataaaaacaggcacttaaaaagagcaccaggtttagtgtagtcttattatagaatgtaggaatgtatgttttagttatttttttcaacgcctgtttcataccatgttttaccgccataaaaatacaaaaccaataccaactttttctataaaaggttttgctgtacacatgtaaacgagcaaaatatatttcaaactctaaattctttttataaaaaaactcgagacagtcatttatgttacgacatcttctaaaaacctcaaaaacagtaattaattcactgtcgctgtagaaatgttcataagctaactgtttaatgtctttaggggtcaattctttttttgggagcagtggtttgagattcggcaaaggtcgtctaaagtagtgagcgaacttttcattcgctccccaacacaaaagccgataagctagcatgtagttatcacattttaccgcgtaaatgagtaaatagtttatattgatacatgtaccatgttgctgtctgtttgggcatatgttgccgcattctgaacacttatgaatgagatcatagttcttacaacataaccccaaatgggttaatatgtctttgtcatgttttaaaaactcgatatgattctttaatgttttgagcgcaatgttaaataaactcagcattttaataaaatgaggtgttttagtattatgtttagtataaaatttagcggtatgtttgcatgatgctaaataaacttaacgttcctactaaaccaaaaaaaaatcaaattgactgactcatagagaatttgacgatgttggtaggtaattttttaacatggtatatatttttttaggatccgttatattaggtaataaaagaggacgtgccgttaaagtattttgcttaagatcctttaaatccttacaaaaatatagattgttcgtatgataatgccactgtgttacagtgatggcttgatcaatatcagctcccaagacaaaacagtagtatatcgttaaaaagttgtaatcttgcatacaagccaactgcatcattttatcgatgtccatatgaacgatcttttgctcgtatatttcatgaaggtcaaatacattgttgaagtaaatggcgcacatgagtcgccacatactaaggtgcccatatgtttgatagaaaaagaagatagctcttttaagcttatattttactgctatggcataccagtatttaacgaatatgttcatgggtacattatccaagatataaaatatgaaaagctttaactctcgatgaatctcctctcccatttcctgcacatttagagcttccaacataggatttttatcaaatatttcatgacataaaataatgttattactcgttttatgacgcattaaaccggcgaaaatttccttattatttaaaccatctttagctcctaactttcgacacagctcctgagtttgttccgtcctagcacaggtcagcccataataaatgtttgctccccattcggtgaacagccttattacatcatagttattttcttttatggccatgattaacgccacatcaagatgaagaagttcccccttaaagggggttgagcttaaaataacgtaattacagtagtgacataagctaatgggcttgttttgccaccataagccacaatattttaaaatataatgatactcctcaggcacgctctgtttggccacagcctttttggccagggtttgcaaggagagcatgataacttcttgaaaaaaaaactcaaattaagttcctacttttttaaaatattagtatggacagatctaccatcatatgaaggaattctttcatcgttaaacactgaagagataatactttcatcgtatagagaatatcatgtcaatccatatattgaatgttatatatcattaaacccatcattaatatagtgtttatgtgctatggacaggttttttgaatgataatcttttaacatacgttttataacttcgggatcagtttcttttaaagataaagaatcattcatgctataacaatttaatgataacatgctggcaatgaacgagttgtctttttggtgcgctagagtctttccctcctcaaaggcattggcgcctaagtctatacaaaagaatatgtttccgatattatagaactgaatagaatgaaacatggcctgattgatatcagcccctaaggcgacgcaacagtaataaatcgttaaatagttataattcttgcgacaggcccaccttagcatttcatccatgtccatacgaaccttctcctttgcgtacagctcgtgaaggtcgaacacattattgtaaaaaagggcgggccaacgtttgtaaagacaacatgctaagtttaaaacatcttaaatctaagctagctaactttcaagaaaatcctctatccctaagaatatatcttataactagacttatagcagtaaaaatcaactttggttattctttttaatataaaacgtctaattacttgcaaagtattatcaagcccattttcctcagctagaatttttattttttaatgaagtagggggatatgttttcccttcaagacctttgccgaaagcatctttttattcttcccgatgtttttggcgagcatgtactacaacgattaggactgtattggagatgtcacggctcccttcaacgcataggagacgaccacatactcatacgacgggatctcatcctttccaccaacgaggccttaagaatggcgggagaggaaggaaacaatgaagtagtaaagctcttgttactgtggaagggaaatcttcattacgccgtcataggagccctgcagggtgatcaatatgacctgatccataagtatgaaaaccaaatcggcgactttcattttatcttaccattgattcaagacgcgaatacgtttgaaaaatgccacgctttagaacgtttttgtggtgtttcatgtctgctaaaacatgctacaaaatacaacatgctccctattctccaaaaataccaagaagagctgtctatgagagcgtatcttcacgaaaccctatttgaactagcatgcctatggcagaggtatgatgtccttaaatggatagagcagaccatgcatgtttacgacctaaagattatgtttaatattgccatctccaagagggatctgactatgtactccttaggatatattttcctttttgatagagggaacaccgaagctacgttgctaacgcaacatctcgagaagacagcggccaaagggctcctccactttgtgctagaaacgttaaaatacggcggcaacatagataccgtcctgacccaagccgtaaagtacaaccatagaaaacttttagattattttctgcgtcaactacctcgtaaacatattgaaaagcttttgttgctggctgttcaggaaaaggcttctaaaaaaacattgaacttactgttgtcacatttaaactactccgtgaaacgcatcaaaaaactgctgcgctatgtgatagagtatgagtccaccttggtgataaagattttgttaaaaaaaagagtaaacctgatagatgccatgttggaaaagatggtaagatatttttctgcgacgaaagtgaggacgatcatggatgagctttcgattagtccggaaagagtcattaagatggctatacagaaaatgagaacggatatcgtaatccatacttcttatgtttgggaggatgatctagaacgtcttactcgtcttaaaaatatggtatacaccataaagtacgaacatgggaaaaaaatgttaattaaagtcatgcacggcatatacaaaaacttattatacggcgaaagggaaaaagtcatgtttcatttagccaagctctatgttgctcaaaatgcggccacccaattcagagacatttgtaaggactgttacaaactggatgtggcacggtttaaaccgcggtttaagcaactaatattagactgtttagaaattgttactaaaaatcttgctatagtatcctggaaatcttagaaaaacatattatttccctatttactatgaaagttatgactgaagaagaaaaaaacctatgtttagaaatattatataaagtaattcattataaaacaatacaatgttaaaattcaatagatatacatcattaatattgattatattttcgaatattatcttctatggtgcaagataatcatctagcgcgtgaaacatgtcctcttcccttcaggaactttgtcgaaaaaagctgcctgactgcatacttccagagttttttgacgactatgtattgcaactgttaggactgcactggcaagatcatggttcccttcagcgtatcgagaagaaccagatacttgttcaacaggaacccatccatatcaatgaagcactcaaagtagcagcatcggaagggaactatgaaatcgtagagctgttgttgtcatgggaggcagatccccgctacgccgtcgtaggagctctagaaagcaaatactatgacctggtttacaaatactatgacctggttaaagactgccatgatatcttgccgctgattcaaaatccggaaacatttgaaaaatgtcatgagttaaacaacccctgttctcttaaatgcttattcaagcatgctgtgatacatgacatgctgccgattcttcaaaaatatacatactttctggatgggtgggagtattgcaaccagatgctgttcgaactggcatgtagtaaaaaaaaatatgagatggttgtgtggatagagggagttctaggcatcggcaaagttacatctcttttcactattgcgattagcaacagagacctgcacctgtattccctgggccacttaatcattcttgagagaatgcagtcctgtggacaagaccccacgtttttactaaatcatttcctgcgagacgtttcaataaaagggcttctcccttttgtactgaaaaccatagaatatggtggaagcaaggagatagccataactctggctaaaaaatatcagcataaacatattttgaaatacttcgaaaccgggaaatgctaaatgcggtatgatgtacccaattgtaatgaatcgtatctttataaatgttgtaaaaacttaactatttgaccacatcatatgattttagaaatttcaagctgctgaacaacagttttatcatacattaaaattccagtaaaatttatattttttttggtaaacaaatgttttctctccaagacatctgtcggaaatatctttttcaacttcctgactcttttgatgaatatacgttacaagtgctagggctatactgggaaaaacacggatctcttcaacgaataagaaaggacgctgtgtttgtacagcgaaatctcatcatttctatcaatgaggctttaagaatcgcagcttcagagggcaacggtagggtagtaaaacttctgttatcatgggaaggaaattttcattatgtgatcataggagctctagagggtgaccattacgacctgattcataagtatggcagtcaaatcgaagactaccacatgattttatcatccatccataatgcaaacacctttgaaaaatgtcatgagttatccaattgtgatatgtggtgtcttatacagaatgctataaaatataatatgctccctattctccaaaaacacagaaatattctgacacatgagggagagaatcaggaattgtttgagatggcatgtgaggaacagaaatatgacatagttttatggataggacaaaccctaatgttaaatgagccggagtttatttttgatatcgccttcgaacggatagatttttctttattaacaatgggttatagccttctttttaataacaagatgagtagtatagacattcatgatgaagaagatcttatttcattactaacagaacacctcgaaaaagcagccactaagggatgtttcttctttatgctagaaactttaaaacatggtggaaatgtaaatatggcagtcttatctaaagctgttgagtataatcatagaaaaattctagactattttatacggcaaaaatgtttatcacgcaaagatattgaaaaactattattagtagccatatccaatagtgcatccaaaaaaactttaaacttactcttgtcttacctaaaccattccgtaaaaaatatcattggaaaaatagtacaatctgttttaaaaaatggtgattttaccatcataatatttttaaaaaaaaagaaaataaacctagtggaacctgctttgataggttttataaattattactatagctattgttttttagaacaatttatccatgagtttgacattcgtccggaaaaaatgattaaaatggccgcgcgaaaaggtaagctaaatatgatcatcgaatttttaaatgaaaaatatgttcataaagatgatcttggagccatatttaaatttctcaaaaacctagtatgtaccatgaaacataaaaaaggaaaagagacattaattgttcttattcataaaatatatcaagttattcaactggagactaaagaaaaatttaaattattaagattttacgtcatgcatgatgcaactatccaatttatatctatgtacaaagactgttttaatttagccggttttaaaccatttcttttagaatgtttggatattgctattaaaaaaaattaccctgatatgatacgaaatatagaaactctgttgaaatgtgagtaaaatttatttttttgatcagagtaagaaaatgttctccctccaggagatctgtcgaaagaacatctactttctacctgactggctcagtgagcatgtgattcagcgactaggtctgtactgggaaaaacatggttctcttcagcgaatcggagacgactatgtacttatacaacaggatctcatcatccccatcaatgaagctctaagaatggcaggggaggaggggaatgatgaggtggtacaactcctattactatgggagggaaacattcattatgccatcataggagctttggagagtgaccattatagcctaatacgtaagctctatgaccaaatcgaagactgtcacgacatccttcccttaattcaagacccaaaaatctttgaaaaatgccatgaattagataaattttgtaacattttatgtctcgtattacacgccgtaaaaaacgatatgctttgcattcttcaagagtataaaatgcatctaagtggagaggatattcaagtggtgtttgaaacagcatgccgttcacaaaaaaacgatattgtgtcatggatgggacaaaatattgcaatatacaactccggagttatttttgatattgcctttgataagatgaatgtgtccttattatctatagggtacacgcttcttttcaatcatcatataaataatacgaacgaaaatattaattctttattgacacaacatcttgaatgggctgccggcatgggccttcttcattttatgctggaaactttaaagtatggcggggatgtaacgataatagttttgtctgaggccgtaaaatatgaccacagaaagattttagattattttctccgtcgaaaaaacttgtaccaagaagatcttgaagaactattattgttggcgatacgtgcagattgttctaaaaagaccttaaacttgttattatcttacttaaactattccataaacaatatccgtaaaaaaatattacaatgtgtaaaagaatatgaaacgaccgttattataaaaattctatggaaaagaaagataaatctgatagagcccattttggcagactttataggatatcatagctatacctatatggtagattttatgcgcgagttttccatccatccggaaaaaatgatcaaaatggctgcgcgagaatcgagggaggacttaatcataaaattttccaaaaaagtttgcaaagagcctaaagatagacttcactatctcaaaagcttagtgtatactatgcgacataaagaaggcaaacaactgttaatttatacaatccataacttatacaaagcttgtcatctagagagtaaagaaatgtttaatttggcacgattttatgcacggcataatgcagtgatccagttcaaatcgatttgtcacgatctctccaagctgaatattaatatcaaaaacttgttgttagaatgtttaggtattgctattaaaaaaaattactttcaacttatcaaaacaatagaaacggatatgcgttatgagtaaaatttttggataagggaagattctaccaaactaactaagacctttcgctagaatgtatcttattgttaatatagattaggtatgacgtgaaaaaatagattaggtaggttgtgaaaaacagattaaacttaaaattatgtgtattatgtaaaattttagaaataaaaatttatttttttttattgagggtacggaaaatgttctccctacaggacctctgtcggaagaacactttcttccttccaaatgattttagcaagcatactctacaacggctggggttgtattggaaagagcatggatccgtccatcgaatagaaaaggacagcataatgatacagaatgaattggttctttctatcaatgatgctttacagcttgcaggagaggagggggacacagatgtggtacagctcttgttactatgggagggaaatctgcattatgccatcataggagctttgaagactgagaattataatctagtatgtgagtaccatagccaaattcaggactggcatattctcctacccttgattcaagatccagaaacattcgaaaaatgtcatgatttaagccttggatgtgaccttatatgccttctccaacatgctgtaaaatgtgatatgctttctattcttgttaaatataaggaggatttactaaatgtaaggattaggcatcgtacccaatccctgtttgttttggcatgcgaaaatcggagatttgagattattgaatggataggtcaaaatctgtcaattcctgaacctgaggccatttttagcattgctattgttacaaaagatgtagaactgttttccttaggatataaaattatttttgattacatgcaaagacaaggaatttttcaattaaccaatgtagttcgcatgcttctgctaaatcgtcatattggtatggcaatagaaaaaggacttttaccttttattctggaaactttaaaatatggtggtagtgtaaaaagagctttatcttatgcagtaatagataataaaagaaaaattatagactatcttgtacgccatgaaaatataccccgaggaactattgaaagacttttgcatctagctgtgaaaaaacaatcttccaggaaaactttgaacttgttgctatcttacataaattacaaggtgaaaaatgttaaaaagttgttagaacatgtagtgaaatacaactctactcttgtgataagaatcttgttagaaaaaaagaaaaacctgctggatgctactttgacaagatatgtcaaagattctacatactttcaggtgaaagaatttatgcaagacttctccatcagcccagaaaaattcattaaaatagctgtgcgggaaaagaggaatgtgttgatcaagggtatttctgaagatatttgggaaaatcccgcggaaagaatcaggaatcttaagcagatagtgtgtaccataaaatatgaaagtggaagacaattcctgataaatatcattcacaccatttaccagagttattctttgaaacctgaagaaattcttaaactggcaacattttatgtcaaacacaatgcaaccacccattttaaagatctctgcaaatatctttggctgaacagaggaacagaaagtaagaaactgtttttagagtgcttggaaattgctgatgagaaggagtttcctgatattaaaagtattgtgagtgaatatattaactacttgtttactgcaggagctattaccaaggaagaaatcatgcaagtctatgctttggagtatgccatgtattaaatttctgaataagtaagcaatagataggttttagaatatgctgtattaagttagtttctgaataagtaattaatagatagattttagtttatgtaaaaatgttaacatttgttaataagttttagataattactattttagagttactattttagattttaccattttagctattattatcttaaataatcactattttagataggtccccgtattaaaaaccaaattaaccattatctatgtttttaataatactttttaaaaaccctccataaaaatttatttttttttcataaaagtagagaaaatgttctccctacaggatctctgtcggaagaacctttttcttccacttgagcccttaggcaagcatgtggttcaacggctgggattatactgggaaggccatggttcacttaaacgagtgggtgattgctttatatgtgtagacaagatttggatcctatccatccataaggctatacaaattgcagcctcggaaggaaatgagaacattgtcaagcttttcttactgtggaaggggagtctacaatatgccatcataggagccttagagggcaggcaatatgatctgattcaaaaatattacaaccaaattggggactgccatgagaatctaccactgattcaagatccagaaatttacgaaagatgccatgaattaaatgttacatgtacctttcaatgcttatttcaacatgctataagagataacatgctgcccattttccaaaaatatggagaagatctgaatggaaacagaagaatggttcaacttctatatgaaatggcatgccgattacaaaattatgatatcatcaaatggataggatttaacctgcatgtttataacttggaagccatttttagcattgcttttgttagaaaggatttaactttgtattctttaggctacatgcttcttctgggtagaatgagtactgaagatagaaactttatttcaatcataacacgccatcttgaatacgcatcaaaaaagggactttttgactttgtactagaatctttgaaatacggaggtcaagtggatacagtgttgtttcaggctgtaaaatacaaccatagaaaaattttggcccattttattcatgaaattccgcgtgaaacagttgaaaagctgatactccatgctgtagaatcgcgggcctccaggaaaacattcaacctgcttttatcttccataaactactgtgtaaacccttttgtcaaaaaactactgcacaccgtggtgaaacacaagtacatgcttatcataaagcttttgctcgagcggcccaaaaagaagataaacctggtagatgctgctctattcaaacttgtaaaatactctacttatgcagaaatagtaaaattcatgaaagagttttctgtggacccagaaagggtggtcaaaatggcagcacgactcatgagagtggacctgattaaaaagatttctaacgatgcatgggaaaataaactagagagaatcaagcaccttaaacagatggtaaataccatgaaccacagaaatggaaaaaatctattgatgtacaatattcacaatattactggatatacctgcttgaacaccaaagaagcatttaacttaacaagattttatgctgtccacaatgcaacatgtttgtttaaagaaatgtgtaaaagctgttttgtacatgataaaatacagttcagagaattgcttgaagattgtttacatattgctaataggcatgattatatccagattgcagaaaccgcagatgaatgtatcaaatatatagatcttattacacctaagtaaatcatgaaaatatatcaagtaaatccagattaaatcaggctaattgtaaatagttgtagataccatataatgaatgttttattaggatagtagttaatagtttagttaagacagtagttctttctgttaagatagtagttctgttaagatagtagtttagttatgatagtggtttagttaagacaatagttttgttaagacagtagttctgttaagtcaatagttcagttaagtcaatagttttgttaagtcaatagttctgctaatacattagttctgttaagataataaaaatttatttttttttcatcaaggtagagaaaatgttctcccttcaggagctctgccggaagaacatttacattcttccttaccccttgggtaagcatgtacttcaacaactagggctgtactggaagggacatggatctcttcaacgaatcggagatgaccatgtactcttacaacaggacctgatcttttccatcaacgaggccttaagaatggcggcagaagaaggaaacaatgaagtagtaaagctcttgttactgtgggagggaaaccttcattatgccatcataggagctttagagggcgaccgatacgaccttatccataaatattatgaacaaattggggactgccacaagattcttcctttaatccaagacccgcaaatctttgaaaaatgccatgaattgagtaactcctgtaacattcgatgccttttagaacatgcagtaaaacacaacatgctttctattcttcaaaaacataaggatcaaataagattacacatggcattaacccaaatactatttgaattggcgtgccatgaacgtaagaatgacatcattagatggatcggttattccctgcacatataccatctagagactatttttgatgttgcattcgcccataaaaatttatccttatacgttttagggtatgaacttctcatgcacaaagtaaatacagaggctgcaaatatagatttacccaatttgctatcatatcaccttcgaactgcggcggcaggaggtcttcttaattttatgttagaaacaataaagcatggtgggtgtgtggataaaaccgttctatccgcggctatcaggtacaagcataggaaaattgtggctcattttattcatcaggttccccgtaaaaccgttaaaaaactgctactctatgctgtgcaggctcgggcccccaaaaaaacactaaatctacttttatcttccttaaactatgccgtgcacaccatcaccaaacaactcgtacacaatgtcatcaactacagttccacgcttgtcgtaaagcttttactcatgcggcgaaaaaggaagttaaacctagtagatgccgttttagccagacttgtaaaatattccacctatacagacattgtacaattcatgggtgagttttctgtgagcccagaaagggtgatcaaaatggctgcacgggaatccaggacctttctgattgaaatgatctccaaagctgcttggggaaatcacccacagacgttgattcatcatctcaaacacctaaccaataccatgaagcctcaatctggaaaagacctcatcatatataccatccactatatttatctaaactctaatatgctggtagcggaggaggaaaaaaatatttttaaattagcaaaattttatgcgaatcataacgcggtaaacaggtttaaacaaatttgtgaagactattatatattagatgcacgatttaaaacacttattttagaatgttttgaaattgccgtccagaaaaactatcctagaattgcaaatattgtggatgactatattcgattccttttttacaggggaaatataaccgaggaagaaattcgtgaagcctattctttaaaagatgctgaggtttatgtagatttaaaatggttacaacaaggagaaatggtttaaactaaatccggtttaaactaaattcggtttaaactacatttggtttatcattagtcattgaaaccatcgaaaaaaaagtatttgtttatccccataaactcatcttttttttgtctcaaagtttgacactaaaattcagtgttttatagtgtttataattaagtgttttgcatgcattgcagaaattttcatcttttttaattggttcaataccacatgtcatacaatatgttgtttgattatcaagattaactttatgaaaggaaagtaagtgagccgcaaatttaaaagtaaaatatctttcatttaaaatgatcttatgaatgtattttcgataaggaggaataaaagcatttgccaaaataaatcgcataaagggcttggaaaaacccatatcttctaatcttttgtgggtataaaccctatttttgtgttttacaaaaacttcattgttataatagtcgttatagctatcaatcatttttttaagtcctataatgcccaaggttgcacgcataaagccgcagtttctactccaaaagccatgcacctgtaaagggtgcttttcatataaccaattacaaaatttcattccgcaacagtagcatgttatttcagtgggggatgtatagaaaaatccggcattcgaaaatttttcataattttttatgccatggattgcgaagctttgatttcgtgcatctatggagctatagcctacatatttaggttttacttcaaataatcgcaaagagatgtatggatctattgtatttattttaggaaacatttcataattttaaattcttatatataatataaaaaaaattacaaacatttgtaatgatcatcctcaattgaaagctgagccgcaggctttatttttctaattatacgaagaaggtaggttctcataaagccttcaagatgactattgatgtttccaatacattttctcaatgagttcataaacccagacattttgctaatggcttggcaaagtgccaacaagttgtccacaaagtactggtagattgcctactagctatagctagctatagctagctatagtgagccaacctctctgtatttattttatatatttcattttttaatagatttaatatttttataaaaaaatatttagttttttatacaagaatgtcgacaaaaaaaaagcccacaattaccaagcaagagctttactccttagtagcggcagatacccagttaaataaagcattgattgaaagaatctttacaagccagcaaaaaataatccaaaatgctttaaagcacaatcaagaagttattataccacccggaatcaagttcaccgtcgttacagtgaaagctaaacctgctcgccagggccataaccccgcaacaggagagcctattcaaattaaagccaagcctgaacataaagccgtaaagatacgagcattgaaacctgttcatgatatgttaaattaaataataaagccatcatcatcgtcgtattcttctttatcattattatcttcaatacatttttgccaatcgaaatcgaataaattcagatcctggacatttaaatacttatcatcgtacattttaatataatttaaacatgagttgttgtcaaaaacttttatcgtttttgttaaaatcattgtatgaataatttccttattaagagttgccggaataatacaaagcctatttttaggtacatcattcatgataatagtaaaattagtaaaaattgtttcttgtttttcttttgtttcaaataaacgttgtaaggttaaaggtttttcattcaatggtttctttgaagataaaaagaatgtataatccggtttaaagatatttttggtttcaatcgtgattccatctgcttgagcatatgctaaaccagaccaaatataatggtccactattacaataaaatttagtttaagtagtgctgcaatttctgcgctaaattcactatgatgttttgtaaataatttatgcaattgttccgatgacatttctgtcattttatttaacacctgcaatataaggccaccggtggtcgtgtctggattaggaaaacgtatacatacagcattataatccatgcattctaatgccttttttaatctcattgcctgtgtgctttttcccacaccattgattccctcgatggtaataagtattccacgcatgattaataaatgggtaaaaagagttcagtttttaacatttcttacaaatctatttttatacaacattgtacaacactacattaaccgcatacgatgttatagcttcattaaatatttgcttttatataatctttaccgacctatatttggcagatcactgcagatggccataactaagataaaaattatttcagatgctactgcggcagtattattaaaatcatgtgcggcaatgtatgacgtcttaatagataaaaaatttaagtaaaacaaatttgaataaaaaaaataatagttatgatggcgttgttacacaaagaaaagcttatagagtgcatcgaaaatgaggtgcttagcggtggtacagtattgctcctagtaaagaatattgttgtgtcagaaatttcatacattgacaatagttataaatattttacctttaatgccaatcatgatctgaaaagcaaagaagatcttaaaggagcaacatccaacaacattgctaaaatgatttataattggattataaaaaatcctcaaaataataagatttggagtggtgagccgcgcactcaaatttattttgaaaatgatttatatcatacgaattataatcatgaatgtataaaagatttttgggatgtttcaacctcagtcggtccttgtatctttaatgatcgtagcatttggtgtactaaatgcacatccttttacccatttaccaacattatgtcgcccaatatattccaataaattagatatcttttactactattaaaatagttaataaccttataggataattaggtactttattacgatgaattagtttatgttattttataattaggtactttattacgatgaattagtttatgttattttataattagttactttattacgatgaatctttattaacgattcttttattaatgaattatcataagataaataattatttttttctccatatatcgcataataggtctggtatgggctaaaagtatgtttcaaactatttacaatagaatttctgttaagaaaacatacataatttgaataaaatttttttaaatatcaccgaaacatccaacatggtgttaatagagtttttaacaggtttcttctatttatatggaaagagactgttttccattagcaaagtcatggacatgatatgtctagactattataccattattcctgctcctctggcgatgatgttagcggcaagaataaaaaactatgacctcatgaaacgactgcacgaatgggaaatctctgttgactacgctctacttgtagtagatgatgtgccgagtatcgacttttgcttaagtcttggcgctaaatccccgactagagcacaaaaaagacaactgttgagggacaacacgtttaatcccgtgtataagtatcttatgaactgttccggttttccaacaagaagagaaaaaaacattccttgtgatgttcaatgcgaaagactgcaaaaaaacattataaaagaactggtattcaactgctccgtgctgcttgaaatggtactgcacacagaaa

SEQ ID NO: 7 - DNA, 32767 bp, African swine fever virus
  source 1..32767: mol_type = genomic DNA
atattcatataatatataaaatattaaaatatatatatttcgtccatgttaaaataatatatcacgtctagaaaaaacactttttttttattaataaaataaacgcgcggccttattaataaaaaaaacgcgcctttataaaaacgtcaccgctaactaaaaaaaaagtcaacagacgggcaccgccttattaataaaaaagcggcctttcgtaaaacatcaaagtgttctacgtcttaaaccgcccggccttattaataaaaaagcggcctttcataaaacacatggcatcaaagtgatctaaagcgccacgtatggccacccgctatccataattttattaaacatgacgacatccgcaatttctaattttaataataatgacgacatccgcaatttgtaatttgaataatgatgacgatatccgcaatttgtaattttaataatgatgacaacatccgcaatttgtaattttaataatgatgacgacatccgcagtttctaattttaataatgatgacgacatccgcaatttgtaatttgaataatgatgacgatatccgcaatttgtaattttaataatgatgacaacatccgcagtttctaattttaataatgatgacgacatccgcaatttgtaattttaataatgatgacgacatccgcaatttgtaattttaataatgatgacaacatccgcaatttgtaattttaataatgatgacaacatccgcagtttctaattttaataatgatgacgacatccgcaatttgtaattttaataatgatgacgacatccgcaatttgtaattttaataatgatgacaacatccgcaatttgtaattttaataatgatgacgacatccgcagtttctaattttaataatgatgacgacatccgcaatttgtaatttgaataatgatgacgatatccgcaatttgtaatttgaataatgatgacgatatccgcaatttgtaattttaataatgatgacaacatccgcagtttctaattttaataatgatgacgacatccgcaatttgtaattttaataatgatgacgacatccgcaatttgtaattttaataatgatgacaacatccgcaatttgtaattttaataatgatgacaacatccgcagtttctaattttaataatgatgacgacatccgcaatttgtaattttaataatgatgacgacatccgcaatttgtaattttaataatgatgacaacatccgcaatttgtaattttaataatgatgacgacatccgcagtttctaattttaataatgatgacgacatccgcaatttgtaatttgaataatgatgacgatatccgcaatttgtaattttaataatgatgacaacatccgcagtttctaattttaataatgatgacgacatccgcaatttgtaattttaataatgatgacgacatccgcaatttgtaataatgacgacatccgcatcgatttaaaattacaaaaaagcattttttagcggtcagtgttttttttcgtcggtacatatagacactacaaaccacaaaatagatgtacgataaccgtaaggactataagtacaatttcacgatatgatattggtagaatacacccgagaaatatgtagaataaccgtcctccgggtgatatatataggacaattcatcaaatcgacatatgataaattacaaaaagcgaactagttctttatatgtttttagattcacgtggtaaaatacccgtagttagttagtgtcgtaagatacccgcacttagttagtgtggtaaaatacccgcagttagttagtgtggtaaaatacccgtagttagttagtgtcgtaagatacccgcacttagttgtgtaataacccctgtcgatggactatagcacataccaccaccgtggcacaacaaacttccgcacataccataatcgcggtacaacaaacttccgcacataccataatcgcggtacaacaaacttccgtcgcgcaatcattgttgcaaaaaaaagcatactgttgtctatacatattctatcgtttaattacgataacagtagttactctttgtattcatctatatctggacggagaaccatcaggttactaggtacaacgtggatttttagggtttttttttgtaattcaaaacctcccattctaaccaaaaagtggtaaccatttctaataataagatttacaaatggggtatctacactttgttactaagaagtatataattgtataaaaaactgaatatgaaaagaagtagatcattccgcaattaaaaaaggcctagacagcaaaaataactattttctcttctcagacctgacattaaaaatttattattctataaataattataggttaataagcaaactgagcgataaaggtacgagagaagtttgcgtagtcgaggatttagatatgtttccttattcaatggaagtgtttttaagtaatggctccattagtaacgggctaattacagtcgagggttgtatgttgttattatatatcaacatattaatgttagtatgtatgtccggttgacgtagtaaagtagttacagatataagcagaagagaaacaatatttaaagtacttccagtttctgcaacaatattcgttggggtgtataattggcggttagaaattttactgatatagcaactatttttataacctaccgaagtcattcgaatatatcatagcggtatgatatggttatggatcaatcgtaaagcaacttactttataataggttacatttcaactaactattacatagatcaagtggtttttaagaattaaagtcaactcgtaataaatccttatcccctaatagtctattattaagtaccgtatcttattataatgacgatcaaaattgtatgacatgtaatattttataaagattttaaaataaaagtgagtttcgaaaggagcgtggattgaaaaccgtatccaggacccacgtgaggtataactgtcattggttgggtttcgactacagacgtggggtaagccatttgtcgagataatttggtactaacaaaaggacatgtcggaagtaattacgttgtaaattacaatttggtacaaattttgaacgacaaaaataattataaacaaatagatatgttcatactacttagcattaaccccgaagtacggtggtgtttggtgttgcgagattttatgttattagtagaaacttgtgtccgacacatcgatcatgaaaaaatcattcacgaacatttcatctaccgtagaagatagacgttttattaataaaggctttttttttagtttaattttatgatttaagataaaaaaaaattatttcggacatttaatatattatttagagcgggtggcataataaaagcctgtgttgaaaaatatggagtaatataaaaatctagatatcaaaaaattgttccgtaattaaaaaagacctagacagcaaaaatttctattttctctctgcaaacttaatatttttagaaatttactattataaagatgattatatagtactaagaaaacaaaacgattaagattcgagagaagctttcgtaatcgaggatttagatatgttttcttgttcaataatcatattttcaaaaaatggcttcattggtaacgggctaactacaatcggggattatgttttgttatcttttaccaattttttaacgatagagagtatgtccggtctatgtagtaaagtagttataagtatagttggaaaaaatatactatataaagtacttctagtctgtgcaataattttctttcgggtgtataatcggcggttagaaattttacagatattgcaactatttttataacctatcgaagtcaatccactatagcatggcggtatgatatggtattggatcgatcgtaaagcaagttacaataaagtaagttatatttcaactagctatagaagagatcttttgttgtttaataataaaaattaaggagatataagaccttttcccctaataatctattgttaaataccgtatcttattataatgatgatcaaaattatgctacataaaatattttataaacatgttataggtaaagtaagttttaaaaacgcggattgagggccgtctttaaggttcatacgaggcataactgtcactgattcgatctcaactacagacgtggggtaagccatttgttgagataatctagtatcaacaaaaggacgtgtcgaaagtaattacgctctaaattgagatttggtagaaatttttaacgactaaaatagtagttaactaataggagtaatcatcttttgtattaacctcgaggtacggtggtgtttggtgttataaagttttatttcatcactaaaaacctatacacgacacaccggtcataaaaaaatcgttctcggacgtctctttcacctcatctgtaaaaaaaaacgttttaccaaattcaaaattacaaaagttcttatgtctaacctatttaatccaactgtaatcattgtctttcataagttataatacatctggatattttttactctgggaggttttttattatttgttgtgttttttttatacaaattataattttactgttaaagatgtaacgaataacgagaataatatgatcaataataataaaatcagcataaaaatataatattttttgttgttggtggttttttccagacatttcatctatttctaacaccatcacctctcgtaacacaagcaccttgtacgtcgtgtaactcgacgaatctgcgacatttttacctgtttgctttataattctatctaagattctaaaggagtacacttaagtgagggttaaaaatggcaaaatgcctatgacgacggctactcgtcgttcttaaacctttttgtgccgtaggatatttttattgaggtagaggttcacttagggtatcgggggttctccacacactttttataacaagtaccccttggctactgacatgtccaacccttatacaaccactacttttcctcccttgtacaatacatatattattaggtgtagtgggccaagaatttataccattcctagtgtagtatcggaatggatctttagtatttgtacgtatttatttatgtaatccgagtagcataggaaaaattttaggtatttataagcaaactatatacgactttaaaaatatttttttttattgataaagaatatttagtagatctttatcaggagcaaaactagccaaatatagaatattataacacgtagctacgtgttgacgaaaaaaaccaggaagaccttgtagtaatataaaagaaagtaattatatggtaagtctacatttacaacttattaaaaataccgttgttagatggtgacttaatataaatcattgtagattatgtagcgaacaaaatagtccgagtcgaaatattagaactattaaaaacaatagtcgaagatttcgaggtagtaataaaaagtttcttcacaggtattagtacaaaccatttttgtgaaattcaaaattatactataaattttaccaacaatatatttaaatggcgaatgtccattagaaataagtcatagtatttgatatgaaaactaccaagtcataagacatttagccataaaacacttagtcatgtaaataatagtaattataaaaatccgactaaaaggttacaaaataacaacgttactcggacgaggaggaaattgccccttcacagacaacctcagtagacaaatccttctcatagtaggtatagataatacttcttttatatatttataactatatgttagtttttataaaaactagtgcagaaacaatagatagctataacaactattgcagaacttattggatgtagtaaaaaaatgtatttttttatctatattaaaaataatatagagttaatagaattctattaatagtttcattgataaaatttctattaatagttatgttgtttatagtattcgattgtataaaaagcttattatcaaaaaatcatttcataattagaaaagtcctaatcaaagaaaactattattctatcctaagcgaaatatttaaaaatttctattatataagtgttactatcttattggcatatatagacgattacagaatgacacaagttattgtaatcggggatttaggtatgttttcttgtataaaagttatgttttcaaaaaatggctctaattgtaacgagctaatcgcaaccgagggttacgttttgtcatcatttaccagttttttaataacagcgcgtatgtccggtcgaggtagtaaaataattatgagtatacttaaaagcaacacaatgtataaagtacttccagtttgtgtaacaactttctttcacgtgtttaattagcggtaagtagttttacggacataagaactgtctttataacttatcgaagaaattctaatataaaatggcgatacggtatggttataaaccaatcgtagagtgatttactctagagtaaattgtatcttaaacaaccatttaggaagttgagggttatttattagtaggaatttaggtggtacaaatgtaaaacattttttcccaataatcttttattaagtactgtgttttactgtaatgatgaacaataaaatgtgaaacaaagtttctttttagcattttaaagtgaacagagttcgagaagaaatcgggggttaaaagccgtatccaaagctcatacgagcaataattatttttcattgggtattaattataaacgcggggtaagtcatttgttgtactaatctagaagtaacaaaaggaattgacggttatggttacgtcataattcgaaatatgggagaaatttcgtattacaggaatagtaataaactaatagtagtagatatatttaactctatcctcgaagtacggtggtatttggtgttgcgagattttatattattagtagaaatctatgcacaacgcaccggttacgggaaaatcgttcacgaacatttcagctaccgacgtacaaataaaacaatttttttttagtttaatagcccatttgtattcctagttgggcatcaattataaacgtcactgtaaaaattgttacttaatactatttttttattaagtactgatagatagtaccttgggtagaaattgtaatttctttttggtctagtagtaaaaaaaaacaacataatcctgaagaagtttaataatgggtgtaaaatagatttttttattttgatgtattatagaacaaagaagtagtttaatagtatggtaaatttcacacatccaacccttgtaaggtattatacccataatttcacaaatatataaaaaagtatccttgtaaataaaccgtctacacaacaggttgttagtatagattattttagtaaaagtggatacccccctactaagaattttcggaataagaatgtctacggtaaaactgtcagggtcgttttcaatgttataaaaggtactcatgtggttacaagttcgagagaaaaccctccttacgacggttaaaatacaaaaaatagaagattgagaggtatgtcgtagtcaaccctttcgtctttcctctaatggtccttctggtcgtttatgtattgtcagacatttgatgcaaacgcttacattaagtgtcgattttatgtagggcgttctattttaggtatccaattgttaaagacggtaaaagcatatagtcggagtacggaaagtaccaaatacacaacacctgtaagacaagccatgcaaaatactccgaaatatcttcaatacatcatctatgtctttagtaacgctgctatttatgacgtcaatcgatatatcaataaaagttcttaccctcttaccaaaaattttcggaacaaggatgtctatggtagaactgtcagggttgtcttagatgttaccaaacgtattcacgtggtcataggttcgaggaaaagtccaccccatgaacaagcaaggtccccgagatagagtatacatatttcttctcaaccttatctatcatcccacttataaacgtctggttcgtaccgatgaacacttgttcaccgacgagcagtcgtttatcgacgaacacccattcggttatttacccggtatgggaactttcctcttaagtcaaactattttttttattgctcaaaagattattgggccagttcgtaaataatttactcaccgtagtctacagacgtagcacgtaagatgaaccttttacccgggtagagattatataaatgtgactgccacttagtatgtcacaaggtaccctatcgatacgaggacatgtcttctgtatagaaattcttgaaataagaatgtttctggtagaactgttcaggtcgttttggctgttaaaaagtgtataactgtggtcatagaatcgaggagaaggtcctctaacagccagctttttgggacatctgatcaatctggtcgatcgtcgttcggctccattgatttcttggagtaacatcacaatataatgcttttttatacaattttaaaccttttttttcgggaaaaatatctagacctttttttaaaagtgtttagattaattttaggagtgtctagaaggaaaagtatttaaaaggaagggttagccacacctgctaacactccatgacctaatcttgttaggtattgtaccattacgggtaaaggaagtgatatacacgtgaccaatatggtcgctctttggagtgttctacagtttattgacaagagttattagttaccgtacgagagtaagtggaacaagaacgtttaaggtacacgtgtaagggtcgttttgaacgtcgaaaggtacattcatgtggtcataggttcaagaagaacacctcctaataggcaacttgcttctacgggaggacggactcatccatcaggattctggactaaccggtcgtccggttcttaagggttcttctagtggttgtaacgatgccgaccgacttgtcgactggcttatcgatcggttaatcgtttggttcactgagcggggagatgagaattatacttttaaattctaagctaagtcgtaaaaaggacacaaaatgtctcttttctataaaaatcagatacttacgtgtaccaaggcgtgtaatttttttatttaataaataaatcggtcgccctttgatatgtacctacgtgtatgagtaaaagttcttaacaacataaagggttgaataagtgtgtttccggtaaaactgtcagggtcgttttgaccgttgtaaggtacattcacgtggttataagttcaagtaagagacttcctaaaaggcaacctacttcaacaggttgctcgaccgaactctggaccaaccggtcttccggttcttaagggttcttctaatgattgtaacgatgccgaccgacttgtcgacgatctatcgatcgattaatcgtttggttcactgcgggagagataagaaatatactactaaattctaactcaggttgtaaaaaggttgcaaaatgtcctttttccataaaaattgataccttaattagaattgggtgataaatctttttttattttctgtgtaaataaattaaaatcgactccgtttaaacgactgtttgagatctcaagtagaaaaaaggtaaggaaggacttcataaacattcctaaggttctggtaccgactcttgttaagtaccataccatctatggaaatagatttagtatgtatgtaaataggtcggttgccctgtggtctgtacgaaagtgtatgagtaagaatatttaccggctgggtagataaaacaaatatgttcacggtagaaccgtcagggtcgttttaactgttgaaaggtacatccgcgtggtcataagctcaagaaggagacctcctaggagacaaccagcttcaacaggttgctcaactgaactttggaccgaccggtcttccggttcttaagggtttttctagtggttgtaacgatgccgaccgacttgtcgactgacttatcgatcggttaatcgttaggtgacatgaaaagtattctagtaaattctaagccagctgtaaaaaagttatcaaacgatccttttttaaaaattagaatatctaagtgtggtgaagtaagagtacgaatccttttttatttggtttagaatgttacatagacctagattactctttgatcttaagtagaaaaaagttgaggaaagaccttacaaataggaaaaaggtgaggaaggaacgttaaaatattcctaaggtcccgaaacccaggtggtgttaggttcgacgacattttatttttatagtaggagtactataagactttttcggaacaaaagatagttctgaaaaaaacattcttggacatttcttaagtagcataatagtacctattttcgtcatttacattagttaatattttaactgaataacttctctttacaatttactcactttagccacaaatgctactacacgtactagtatgcttctttgtccaagtgaccacaggtactagttttaaattataagttgcatttttcatgtctgcaattgacaaatcaaatttgtaatcaaatgtgatttccaattagaaatctaattcggatcagttgttacaaactgtaaagaaggtaagaatatgccccccccccccagaattagcaacattatgataacaacacctaacaacttgtattacttctgaaatatctacgatttagttacttaatattattagtttgacaaattacactcgatatttagaatattttcataaatagttttaaataaaaaaaaatatttttcatgtccttaattagtaaatcaaatttgaaatcaaaccgataaactcaattgcatcaaattataaagaaggtacgaataggtttccccccccccccccagaattagcaagattatgataacaacacctaacaacttgtattacttttgaaatatctacggattttattaacttagatttttatcatcatatgaaattagttttaaactaaagagtattttttccatgtgtagtaagtaaattcaaagtactacaaatcaagtaatgaagatgttaatgacccccccccccagggagtatcgaaatcataataacaccgaatgactgataatacatcttcttaagtatcttcgttgttatatacaatgattacgatgtaacatttaatattttatgtatgatttgattaaagtcataaaaaaaaacaagtatattcaattccatgtttttactaatttgtgacgtttttttcttttagtattacgataatatgtatcactagtatcaccgaacatagtaaagatttgatcaaggtttacttataacccgttatgtagataaaaagtagtaatactaaaaataccatatatacatacttttcaatctatatgtagtttttatagtcaagaccttaatatgctacagtccgaatagacctgtattgcatgtccattatacattcacaatgatttatgatacttcatagataaaaaaaatgttgttttttttatctacattagccaaaatagtaaatccacacataaagaaatcgtagaaagattcttaagtaacaaatcgccatatttttgttacttactagtagtataagataaattgttagaggatttatttacttgtagaaaaagtaaaattgtactagtggttatcagtaaaacgcttttccgtatgtatactagttatagtctggatgttacttacaaaggtattatagggaaatagcgttattaagataaaaacgtaaggctatagagtagtagacacgataatatacaaaggtattgacaaagtagtagtttgtatttaggataatttattcgtttcgcgaaattagggcctatctaaaagtggtaaaaagattctcggcacatatcgaacattatttaccggtctttatacgttatttcgcatctttctctcattaaaaaccgtattttccaaaacttccaaactacttaccgatttagcgtctattatattctatgctataatttcgcgtggacaagtgcgtctaaacaacttttgaagcatctttctaagttgtttattttccaataattatcaacgagtagtaagaggaatatgctgtagcagtctgcgagattctaaaatgatgacctgtgtagacggtgtacaacttgtaaatttcggacaagaagaagacacaatgctgttttctcggcgcgtataagtccacttcgaggggtcctattgttgcaggcacagtgccgatttaaaaaaaactgctactgaaagtagtctttattcagaaataaaaacgtaactagtgatacgcttaaacatatcaactgcggcaacgtaactcatgtaactatattacaaaacgttaaggtcgcatcgggatttaccatattttcctgacataaaagctgcgttcgtacgactaattgctacaaaaactctgttgtgcaacaattcctgtggtataacagaggttaaacaacctattttcagaaatgatttttttatccaaaaatcaaaattgttagctctaaaataataaacctatatcgtagtagtttttctaaatacaattttaaattaaacagaatgtttttcatgtctaagttattaaccaaattgataaatcaaattgataaatcaatttaatgaaccaatcgttacaaactcgaaagaaggtaagaataagctcccccccccccccaggattatcaaaactatgaaaacaacacctaacaactacttttgacatgtctacgatttcgttaccgtatattataattaacatgacaaattacactcaaatattcatacatagttttaaataaaaaaaaatattttcatgtctttaattacaatcgaatttgaaatcaaatcgataaactcaattactacaaattggatagaaggtacgaatagtccccccccccccaggattaacaaaatgcaatatttaaactagttttaaattaaagaatattttttccatgtgtagttgtaacgagtaaattcaaagtattacaaactaagtaatgaaggatgttaatgacccccccccccagaaattatcgtaattataataataccaaacgactgataaaccttaaatatcttcgtttttatctatgaaaatgattatcgtcacgtaatattcactagttttaaattatagagtattttttccatgtgtagttgtagtaagtaaacaaagtactacaaactaagtaatgaaagatgttagtgaccccccccccagagagtatcgaaatcataacgataccaaatgattaataatacatcttaaatatcctcgtctatatataccaccattaacatgagatattcaaatatttttaaagtcatataaaaaaaacaattatattgtctttactaaatttaatgttttttttctcttagtagtacgataatatgtaacaataatatcatcgtatacattcaatatttaaccaaggttttgttataaccggttatgagtacaaataccgaatgtaccatatatgggtactttttaatctatatttactttctaggcctaaaacctttatataatatcgttttgataagtctacggtgcctacactttatacattcactataatttttgtattatgcttcacattattaactgataaaaaacaacttacctttgacaaaaactcattatacaacttgtattaccaaaaatatctacaatttagtaaactaacatcattaacatgatttactacactctatatttggatcaagttagttttaaattaaaaaaatatttttcgatgtctcacaaaataatttgcatcgaataaatttttcaatgtgttacaattttagagatgaatgaaattaagaaacaccccaaaataattgaaataggtataataccgaataatgaatggtacatcttgaatatcttcgttatctactaaagatgctgactttatatcttatcaagtaaaagataaacattttattactaaatataagagaggatttttatgctagctaggaaatatacgaaacttttgcttataattgttgaactaaaaaaaaagatatttatttgatatttacttttatcattttgagtatctcagaatattcacttgtaggtagtacaatgagtttgcaacctgataattttctatgaggcacacgtaataacgaaaattagtcatactaatgaaatatgcttcggcgataattttgcgaatagtgtgtggcttttgtctaaaattttgtggggctatcggcactttaaaatgatcgaaaccccaacatgaccctattttgagtataagaacaatttacagcacttacacccttttactcagaatggccttttgtgtcatgttttacataattgtaattaacagatgaataagaacggtatttttttttcttattcgcataccaactatggaactattcttacccacgcctacattgtatatatgtagaaaatttcttattctattttgacagtatgttggtcgacagatacgaattttcgttgagcgtctaaagcaacttcctcgaagtacgatatacgatggaaaatataccagccgaagggtttttttaatttgttccctacgttgacacattttgttaccgccctgatacaccacttgaaaatactcgtaaaaatcgaggcatttacattatatacatatattttgtttatctattatggttttatataagatacatgtattgtaggccttttaataaaaaaaaagagtatgggaatttatatttttataacccaaagaagtgatttgaaatctccatttttaaaaagaaacaaaacgtagtagtacatacccaaatccaatagggtccctaacaaataaacttataaaggatttatccttgtgttgcggtactagtatatagaaagtaagaccattcgaaaaactatgtagaagtttctacggcatggaggctcacacattgtcgtttgtttgcaggcatgaaaaggtacccagcgtcgggtaaggtaaggcatcgagtcgtaggaaacgacataaaaaaataagcgaaatatttttttcataaagtaggtaaggtgcaagagtatttttgtccgtgaatttttctcgtggtccaaatcacatcagaataatatcttacatccttacatacaaaatcaataaaaaaagttgcggacaaagtatggtacaaaatggcggtatttttatgttttggttatggttgaaaaagatattttccaaaacgacatgtgtacatttgctcgttttatataaagtttgagatttaagaaaaatatttttttgagctctgtcagtaaatacaatgctgtagaagatttttggagtttttgtcattaattaagtgacagcgacatctttacaagtattcgattgacaaattacagaaatccccagttaagaaaaaaaccctcgtcaccaaactctaagccgtttccagcagatttcatcactcgcttgaaaagtaagcgaggggttgtgttttcggctattcgatcgtacatcaatagtgtaaaatggcgcatttactcatttatcaaatataactatgtacatggtacaacgacagacaaacccgtatacaacggcgtaagacttgtgaatacttactctagtatcaagaatgttgtattggggtttacccaattatacagaaacagtacaaaatttttgagctatactaagaaattacaaaactcgcgttacaatttatttgagtcgtaaaattattttactccacaaaatcataatacaaatcatattttaaatcgccatacaaacgtactacgatttatttgaattgcaaggatgatttggtttttttttagtttaactgactgagtatctcttaaactgctacaaccatccattaaaaaattgtaccatatataaaaaaatcctaggcaatataatccattattttctcctgcacggcaatttcataaaacgaattctaggaaatttaggaatgtttttatatctaacaagcatactattacggtgacacaatgtcactaccgaactagttatagtcgagggttctgttttgtcatcatatagcaatttttcaacattagaacgtatgttcggttgacgtagtaaaatagctacaggtatacttgctagaaaacgagcatataaagtacttccagtttatgtaacaacttcatttaccgcgtgtactcagcggtgtatgattccacgggtatacaaactatctttttcttctatcgagaaaattcgaatataaaatgacgataccgtatggtcataaattgcttatacaagtacccatgtaataggttctatattttatacttttcgaaattgagagctacttagaggagagggtaaaggacgtgtaaatctcgaaggttgtatcctaaaaatagtttataaagtactgtattttattacaataatgagcaaaatactgcgtaatttggccgcttttaaaggaataataaatttggtagaaatcgaggattgaaagctgtgtcgaggactcaaacaaggcaggatcgtgtccagtcgggtattatttacaaacgaggggtaagccacttgtcggaataatgtagtatcaataaaagaaaataccggtactaattgcggtgtagttctacttcttcaagggggaatttcccccaactcgaattttattgcattaatgtcatcactgtattcgattacccgaacaaaacggtggtattcggtgttataaaattttatattactatgaggagtccgtgcgagacaaaccggtgtcggaaaaaccggtcccaaacgttcctctcgtactattgaagaactttttttttgagtttaattcaaggatgaaaaaattttataatcatacctgtctagatggtagtatacttccttaagaaagtagcaatttgtgacttctctattatgaaagtagcatatctcttatagtacagttaggtatataacttacaatatatagtaatttgggtagtaattatatcacaaatacacgatacctgtccaaaaaacttactattagaaaattgtatgcaaaatattgaagccctagtcaaagaaaatttctatttcttagtaagtacgatattgttaaattactattgtacgaccgttacttgctcaacagaaaaaccacgcgatctcagaaagggaggagtttccgtaaccgcggattcagatatgttttcttatacaaaggctataatatcttgacttatcttactttgtaccggactaactatagtcggggattccgctgcgttgtcattatttagcaatttatcaatattaagaacgctgtccgggtggaatcgtaaagtaggtacaggtatgcttggaagaggaaacgcatgtcgagcacttccagcttgtgtaataacattttttcccgcccggttgcaaacatttctgttgtacgattcaaattttgtagaatttagattcgatcgattgaaagttcttttaggagatagggattcttatatagaatattgatctgaatatcgtcatttttagttgaaaccaataagaaaaattatattttgcagattaatgaacgtttcataatagttcgggtaaaaggagtcgatcttaaaaataaaaaattacttcatccccctatacaaaagggaagttctggaaacggctttcgtagaaaaataagaagggctacaaaaaccgctcgtacatgatgttgctaatcctgacataacctctacagtgccgagggaagttgcgtatcctctgctggtgtatgagtatgctgccctagagtaggaaaggtggttgctccggaattcttaccgccctctccttcctttgttacttcatcatttcgagaacaatgacaccttccctttagaagtaatgcggcagtatcctcgggacgtcccactagttatactggactaggtattcatacttttggtttagccgctgaaagtaaaatagaatggtaactaagttctgcgcttatgcaaactttttacggtgcgaaatcttgcaaaaacaccacaaagtacagacgattttgtacgatgttttatgttgtacgagggataagaggtttttatggttcttctcgacagatactctcgcatagaagtgctttgggataaacttgatcgtacggataccgtctccatactacaggaatttacctatctcgtctggtacgtacaaatgctggatttctaatacaaattataacggtagaggttctccctagactgatacatgaggaatcctatataaaaggaaaaactatctcccttgtggcttcgatgcaacgattgcgttgtagagctcttctgtcgccggtttcccgaggaggtgaaacacgatctttgcaattttatgccgccgttgtatctatggcaggactgggttcggcatttcatgttggtatcttttgaaaatctaataaaagacgcagttgatggagcatttgtataacttttcgaaaacaacgaccgacaagtccttttccgaagatttttttgtaacttgaatgacaacagtgtaaatttgatgaggcactttgcgtagttttttgacgacgcgatacactatctcatactcaggtggaaccactatttctaaaacaattttttttctcatttggactatctacggtacaaccttttctaccattctataaaaagacgctgctttcactcctgctagtacctactcgaaagctaatcaggcctttctcagtaattctaccgatatgtcttttactcttgcctatagcattaggtatgaagaatacaaaccctcctactagatcttgcagaatgagcagaatttttataccatatgtggtatttcatgcttgtaccctttttttacaattaatttcagtacgtgccgtatatgtttttgaataatatgccgctttccctttttcagtacaaagtaaatcggttcgagatacaacgagttttacgccggtgggttaagtctctgtaaacattcctgacaatgtttgacctacaccgtgccaaatttggcgccaaattcgttgattataatctgacaaatctttaacaatgatttttagaacgatatcataggacctttagaatctttttgtataataaagggataaatgatactttcaatactgacttcttctttttttggatacaaatctttataatatatttcattaagtaatattttgttatgttacaattttaagttatctatatgtagtaattataactaatataaaagcttataatagaagataccacgttctattagtagatcgcgcactttgtacaggagaagggaagtccttgaaacagcttttttcgacggactgacgtatgaaggtctcaaaaaactgctgatacataacgttgacaatcctgacgtgaccgttctagtaccaagggaagtcgcatagctcttcttggtctatgaacaagttgtccttgggtaggtatagttacttcgtgagtttcatcgtcgtagccttcccttgatactttagcatctcgacaacaacagtaccctccgtctaggggcgatgcggcagcatcctcgagatctttcgtttatgatactggaccaaatgtttatgatactggaccaatttctgacggtactatagaacggcgactaagttttaggcctttgtaaactttttacagtactcaatttgttggggacaagagaatttacgaataagttcgtacgacactatgtactgtacgacggctaagaagtttttatatgtatgaaagacctacccaccctcataacgttggtctacgacaagcttgaccgtacatcatttttttttatactctaccaacacacctatctccctcaagatccgtagccgtttcaatgtagagaaaagtgataacgctaatcgttgtctctggacgtggacataagggacccggtgaattagtaagaactctcttacgtcaggacacctgttctggggtgcaaaaatgatttagtaaaggacgctctgcaaagttattttcccgaagagggaaaacatgacttttggtatcttataccaccttcgttcctctatcggtattgagaccgattttttatagtcgtatttgtataaaactttatgaagctttggccctttacgatttacgccatactacatgggttaacattacttagcatagaaatatttacaacatttttgaattgataaactggtgtagtatactaaaatctttaaagttcgacgacttgttgtcaaaatagtatgtaattttaaggtcattttaaatataaaaaaaaccatttgtttacaaaagagaggttctgtagacagcctttatagaaaaagttgaaggactgagaaaactacttatatgcaatgttcacgatcccgatatgaccctttttgtgcctagagaagttgcttattctttcctgcgacacaaacatgtcgctttagagtagtaaagatagttactccgaaattcttagcgtcgaagtctcccgttgccatcccatcattttgaagacaatagtacccttcctttaaaagtaatacactagtatcctcgagatctcccactggtaatgctggactaagtattcataccgtcagtttagcttctgatggtgtactaaaatagtaggtaggtattacgtttgtggaaactttttacagtactcaataggttaacactatacaccacagaatatgtcttacgatattttatattatacgagggataagaggtttttgtgtctttataagactgtgtactccctctcttagtccttaacaaactctaccgtacactccttgtctttatactgtatcaaaatacctatcctgtttgggattacaatttactcggcctcaaataaaaactatagcggaagcttgcctatctaaaaagaaataattgttacccaatatcggaagaaaaattattgttctactcatcatatctgtaagtactacttcttctagaataaagtaatgattgtcttgtggagctttttcgtcggtgattccctacaaagaagaaatacgatctttgaaattttgtaccacctttacatttataccgtcagaatagatttcgacaactcatattagtatctttttaagatctgataaaatatgccgtttttacaaatagtgcgtttctataactttttgataataatcatcggtataggttatcacgtaggtttttttgaaatttgaatgagaacagaatggatttggtaaggcattttttatagtaacctttttatcatgttagacaaaattttttaccactaaaatggtagtattataaaaatttttttttcttttatttggatcaccttggacgaaactatccaaaatatttaataatgatatcgataacaaaaaatcttgttaaataggtactcaaactgtaagcaggccttttttactaattttaccggcgcgcttttccattcgatttatactagtagcttaaaaatttactttttatacaagtatttctactagaacctcggtataaatttaaagagtttttggatcatacatggtactttgtattttttccttttctctgtaattaacaagaataagtattttatatagttcaataagttgacctctgatttctttttaaatttaataattctaaaatgcagtacgtactacgttgataggttaaatatagatacatgtttctgacaaaattaaatcggccaaaatttggtaaagaaaatcttacaaacctataacgataattttttttaatgggactatactatgctttatatctttgagacaactttacactcattttaaataaaaaaactagtctcattcttttacaagagggaggtcctctagacagctttcttgtagatgaaagatggactgaccgagtcactcgtacactaagtcgctgatccagacatgaccctttttgtaccaagagaagtcgcttagcctctgctgatacatgaatatgttgtcctagagtagtaggggtagttacttcgagattcttaccgtcccctcctccccttactactccaccatgttgaggataatgataccctccctttgtaagtaatacggtagtatcctcgaaacctctcactggtaatatcggattatgcattcgagatactggtttagcttctgacagtgctgtaggaagggaattaagttctgggtttttagaaactttttacggtacttaatctatttaaaacattgtaaaatacagagcataatgtgcggcattttttgctatacgaaacgtaagaagttctcatattttacgtagattcacctctcctataagttcaccacaaactttgtcgtacggcaagtgtttttttgctataacacagtacctaccctgttttataacgttatatgttgaggcctcaataaaaactataacggaaactattctacttacacaggaataatagatatcccatgtgcgaagaaaagttagtagtatatttattatgcttgcttttataattaagaaataactgtgttgtagaacttacccgacggccgtacccggaagaagtaaaatacgacctttgaaatttcataccgcccctacattgctattatcaaaacagactccggcattttatactggtgtctttctaaaatctaataaaagaggcagcttttttgaacatggttcttctagaacttcttgataataacaaccgctatgcacgtctaacaagatttttctggaatttgaacaataatagaatgaatttgataaggtatttgttataggcatttttttataatgttacacattttcttatactttgctggcaataatatttttaagataccttttctttctatttagactatctcgggtaaaaccgtctgaaatatcctatagtatcgatatggatataccatctaaaatacgcgctcaaaaggtaggtaggccttttttactagttttaccgacgcgctcttagctccctcctgaattagtattttaaaaggttttttcaaacgtttctcggatttctatctgaagtgatagagttttcgaatcacatatgatacgctgtatttcttccgtttgttgacaattaaatatgttaggtattgaatatgtttcgaacagtagatctctcatttctttacaaattaaaccgtgctaaaatacgtgccgtattacgtcactaggtcaagtttagctaaacagtgctagagaggttcgacttataattatagtttttgaacaacaatcttacaaatccataacgataattttttttaatgaaagttgaatagttttgttatctttgcctatacgcaatactcattttaaaaacctattcccttctaagatggtttgattgattctggaaagcgatcttacatagaataacaattatatctaatccatactgcacttttttatctaatccatccaacactttttgtctaatttgaattttaatacacataatacattttaaaatctttatttttaaataaaaaaaaataactcccatgccttttacaagagggatgtcctggagacagccttcttgtgaaagaaggaaggtttactaaaatcgttcgtatgagatgttgccgaccccaacataacctttctcgtacctaggcaggtagcttatcttttcctgtcgtattactatgtcttacttaaccaagaaagatagttactacgaaatgtcgaacgtcctctcctccccctgtgtctacaccatgtcgagaacaatgataccctccctttagacgtaatacggtagtatcctcgaaacttctgactcttaatattagatcatacactcatggtatcggtttaagtcctgaccgtataagaggatgggaactaagttctaggtctttgtaagctttttacagtactaaattcggaacctacactggaatatacggaagaggttgtacgacattttacactatacgaaagataagaacaatttatattcctcctaaatgatttacattcctaatccgtagcatgggttagggacaaacaaaaccgtacgcttttagcctctaaactctaataacttacctatccagttttagacagttaaggacttggactccggtaaaaatcgtaacgataacaatgttttctacatcttgacaaaaggaatcctatattttaataaaaactaatgtacgtttctgttccttaaaaagttaattggttacatcaagcgtacgaagacgatttagcagtataaccataccgttatctttttcctgaaaatggaaaataagacctttgaaattttataccaccatcacatttttctcgaaatagaatacgtcattatctattattttctttttaatatctgatagaacatgcggtacttttatatggggctccttgataactttctgaaaacgtagatcgacacttttttgttagaaggtccttttgaaacttgaacaacgatagaatgtatttaatgttccactttttacaatttttcaacaatcttgtacatcactttatgttgagatgagaacactattcttagaacaatctttttttctttttggacgacctacgatgaaactgttctatacagtttctaagatgtatgaaagtccactttcttaaatacgttctgaagaggtagtcgggtctttttaagtaattttatcgacacgcccttttctccttacacaactagttcccataaagacttctataaacccttttagggcgcctttcttagtccttagaattcgtctatcacacatggtattttatactttcaccttctgttaaggactatttatagtaagtgtggtaaatggtctcaataagaaactttggacttctttaagaatttgaccgttgtaaaatacagtttgtgttacgttggtgggtaaaatttctagagacgtttatagaaaccgacttgtctccttgtctttcattctttgacaaaaatctcacgaacctttaacgactactcttcctcaaaggactataattttcataacactcacttatataattgatgaacaaatgacgtcctcgataatggttccttctttagtacgttcagatacgaaacctcatacggtacataatttaaagacttattcattcgttatctatccaaaatcttatacgacataattcaatcaaagacttattcattaattatctatctaaaatcaaatacatttttacaattgtaaacaattattcaaaatctattaatgataaaatctcaatgataaaatctaaaatggtaaaatcgataataatagaatttattagtgataaaatctatccaggggcataatttttggtttaattggtaatagatacaaaaattattatgaaaaatttttgggaggtatttttaaataaaaaaaaagtattttcatctcttttacaagagggatgtcctagagacagccttcttggaaaaagaaggtgaactcgggaatccgttcgtacaccaagttgccgaccctaatatgacccttccggtaccaagtgaatttgctcacccactaacgaaatatacacatctgttctaaacctaggataggtaggtattccgatatgtttaacgtcggagccttcctttactcttgtaacagttcgaaaagaatgacaccttcccctcagatgttatacggtagtatcctcggaatctcccgtccgttatactagactaagtttttataatgttggtttaacccctgacggtactcttagatggtgactaagttctaggtctttaaatgctttctacggtacttaatttacaatgtacatggaaagttacgaataaagttgtacgatattctctattgtacgacgggtaaaaggtttttatacctcttctagacttacctttgtcttcttaccaagttgaagatatactttaccgtacggctaatgttttaatactatagtagtttacctatcctaaattggacgtacaaatattgaaccttcggtaaaaatcgtaacgaaaacaatctttcctaaattgaaacataagaaatccgatgtacgaagaagacccatcttactcatgacttctatctttgaaataaagttagtattgtgcggtagaacttatgcgtagttttttccctgaaaaactgaaacatgatcttagaaactttatgcctccagttcacctatgtcacaacaaagtccgacattttatgttggtatctttttaaaaccgggtaaaataagtactttaaggcgcactttgtcaacttttcgactatgaggtacgacatcttagcgcccggaggtccttttgtaagttggacgaaaatagaaggtatttgatgacacatttgggaaaacagttttttgatgacgtgtggcaccactttgtgttcatgtacgaatagtatttcgaaaacgagctcgccgggtttttcttctatttggaccatctacgacgagataagtttgaacattttatgagatgaatacgtctttatcattttaagtactttctcaaaagacacctgggtctttcccaccagttttaccgtcgtgctgagtactctcacctggactaatttttctaaagattgctacgtacccttttatttgatctctcttagttcgtggaatttgtctaccatttatggtacttggtgtctttaccttttttagataactacatgttataagtgttataatgacctatatggacgaacttgtggtttcttcgtaaattgaattgttctaaaatacgacaggtgttacgttgtacaaacaaatttctttacacattttcgacaaaacatgtactattttatgtcaagtctcttaacgaacttctaacaaatgtataacgattatccgtactaatataggtctaacgtctttggcgtctacttacatagtttatatatctagaataatgtggattcatttagtacttttatatagttcatttaggtctaatttagtccgattaacatttatcaacatctatggtatattacttacaaaataatcctatcatcaattatcaaatcaattctgtcatcaagaaagacaattctatcatcaagacaattctatcatcaaatcaatactatcaccaaatcaattctgttatcaaaacaattctgtcatcaagacaattcagttatcaagtcaattcagttatcaaaacaattcagttatcaagacgattatgtaatcaagacaattctattatttttaaataaaaaaaaagtagttccatctcttttacaagagggaagtcctcgagacggccttcttgtaaatgtaagaaggaatggggaacccattcgtacatgaagttgttgatcccgacatgaccttccctgtacctagagaagttgcttagcctctactggtacatgagaatgttgtcctggactagaaaaggtagttgctccggaattcttaccgccgtcttcttcctttgttacttcatcatttcgagaacaatgacaccctccctttggaagtaatacggtagtatcctcgaaatctcccgctggctatgctggaataggtatttataatacttgtttaacccctgacggtgttctaagaaggaaattaggttctgggcgtttagaaactttttacggtacttaactcattgaggacattgtaagctacggaaaatcttgtacgtcattttgtgttgtacgaaagataagaagtttttgtattcctagtttattctaatgtgtaccgtaattgggtttatgataaacttaaccgcacggtacttgcattcttactgtagtaatctacctagccaataagggacgtgtatatggtagatctctgataaaaactacaacgtaagcgggtatttttaaataggaatatgcaaaatcccatacttgaagagtacgtgtttcatttatgtctccgacgtttatatctaaatgggttaaacgatagtatagtggaagcttgacgccgccgtcctccagaagaattaaaatacaatctttgttatttcgtaccacccacacacctattttggcaagataggcgccgatagtccatgttcgtatccttttaacaccgagtaaaataagtagtccaaggggcattttggcaattttttgacgatgagatacgacacgtccgagcccgggggtttttttgtgatttagatgaaaatagaaggaatttgatacggcacgtgtggtagtggtttgttgagcatgtgttacagtagttgatgtcaaggtgcgaacagcatttcgaaaatgagtacgccgctttttccttcaatttggatcatctacggcaaaatcggtctgaacattttataaggtggatatgtctgtaacatgttaagtacccactcaaaagacactcgggtctttcccactagttttaccgacgtgcccttaggtcctggaaagactaactttactagaggtttcgacgaacccctttagtgggtgtctgcaactaagtagtagagtttgtggattggttatggtacttcggagttagaccttttctggagtagtatatatggtaggtgatataaatagatttgagattatacgaccatcgcctcctcctttttttataaaaatttaatcgttttaaaatacgcttagtattgcgccatttgtccaaatttgtttaaacacttctgataatatataatctacgtgctaaattttgtgaataaaatcttacaaaactttaacggcaggtctttttgataggatcttaacgtttataacacctactgatataagctaaggaaaaaatgtcccctttatattggctccttctttaagcacttcggataagaaattttctacgactccaaatacatctaaattttaccaatgttgttcctctttaccaaatttgatttaggccaaatttgatttaagccaaatttgatgtaaaccaaatagtaatcagtaactttggtagcttttttttcataaacaaataggggtatttgagtagaaaaaaaacagagtttcaaactgtgattttaagtcacaaaatatcacaaatattaattcacaaaacgtacgtaacgtctttaaaagtagaaaaaattaaccaagttatggtgtacagtatgttatacaacaaactaatagttctaattgaaatactttcctttcattcactcggcgtttaaattttcattttatagaaagtaaattttactagaatacttacataaaagctattcctccttattttcgtaaacggttttatttagcgtatttcccgaacctttttgggtatagaagattagaaaacacccatatttgggataaaaacacaaaatgtttttgaagtaacaatattatcagcaatatcgatagttagtaaaaaaattcaggatattacgggttccaacgtgcgtatttcggcgtcaaagatgaggttttcggtacgtggacatttcccacgaaaagtatattggttaatgttttaaagtaaggcgttgtcatcgtacaataaagtcaccccctacatatctttttaggccgtaagcttttaaaaagtattaaaaaatacggtacctaacgcttcgaaactaaagcacgtagatacctcgatatcggatgtataaatccaaaatgaagtttattagcgtttctctacatacctagataacataaataaaatcctttgtaaagtattaaaatttaagaatatatattatattttttttaatgtttgtaaacattactagtaggagttaactttcgactcggcgtccgaaataaaaagattaatatgcttcttccatccaagagtatttcggaagttctactgataactacaaaggttatgtaaaagagttactcaagtatttgggtctgtaaaacgattaccgaaccgtttcacggttgttcaacaggtgtttcatgaccatctaacggatgatcgatatcgatcgatatcgatcgatatcactcggttggagagacataaataaaatatataaagtaaaaaattatctaaattataaaaatatttttttataaatcaaaaaatatgttcttacagctgtttttttttcgggtgttaatggttcgttctcgaaatgaggaatcatcgccgtctatgggtcaatttatttcgtaactaactttcttagaaatgttcggtcgttttttattaggttttacgaaatttcgtgttagttcttcaataatatggtgggccttagttcaagtggcagcaatgtcactttcgatttggacgagcggtcccggtattggggcgttgtcctctcggataagtttaatttcggttcggacttgtatttcggcatttctatgctcgtaactttggacaagtactatacaatttaatttattatttcggtagtagtagcagcataagaagaaatagtaataatagaagttatgtaaaaacggttagctttagcttatttaagtctaggacctgtaaatttatgaatagtagcatgtaaaattatattaaatttgtactcaacaacagtttttgaaaatagcaaaaacaattttagtaacatacttattaaaggaataattctcaacggccttattatgtttcggataaaaatccatgtagtaagtactattatcattttaatcatttttaacaaagaacaaaaagaaaacaaagtttatttgcaacattccaatttccaaaaagtaagttaccaaagaaacttctatttttcttacatattaggccaaatttctataaaaaccaaagttagcactaaggtagacgaactcgtatacgatttggtctggtttatattaccaggtgataatgttattttaaatcaaattcatcacgacgttaaagacgcgatttaagtgatactacaaaacatttattaaatacgttaacaaggctactgtaaagacagtaaaataaattgtggacgttatattccggtggccaccagcacagacctaatccttttgcatatgtatgtcgtaatattaggtacgtaagattacggaaaaaattagagtaacggacacacgaaaaagggtgtggtaactaagggagctaccattattcataaggtgcgtactaattatttacccatttttctcaagtcaaaaattgtaaagaatgtttagataaaaatatgttgtaacatgttgtgatgtaattggcgtatgctacaatatcgaagtaatttataaacgaaaatatattagaaatggctggatataaaccgtctagtgacgtctaccggtattgattctatttttaataaagtctacgatgacgccgtcataataattttagtacacgccgttacatactgcagaattatctattttttaaattcattttgtttaaacttattttttttattatcaatactaccgcaacaatgtgtttcttttcgaatatctcacgtagcttttactccacgaatcgccaccatgtcataacgaggatcatttcttataacaacacagtctttaaagtatgtaactgttatcaatatttataaaatggaaattacggttagtactagacttttcgtttcttctagaatttcctcgttgtaggttgttgtaacgattttactaaatattaacctaatattttttaggagttttattattctaaacctcaccactcggcgcgtgagtttaaataaaacttttactaaatatagtatgcttaatattagtacttacatattttctaaaaaccctacaaagttggagtcagccaggaacatagaaattactagcatcgtaaaccacatgatttacgtgtaggaaaatgggtaaatggttgtaatacagcgggttatataaggttatttaatctatagaaaatgatgataattttatcaattattggaatatcctattaatccatgaaataatgctacttaatcaaatacaataaaatattaatccatgaaataatgctacttaatcaaatacaataaaatattaatcaatgaaataatgctacttagaaataattgctaagaaaataattacttaatagtattctatttattaataaaaaaagaggtatatagcgtattatccagaccatacccgattttcatacaaagtttgataaatgttatcttaaagacaattcttttgtatgtattaaacttattttaaaaaaatttatagtggctttgtaggttgtaccacaattatctcaaaaattgtccaaagaagataaatatacctttctctgacaaaaggtaatcgtttcagtacctgtactatacagatctgataatatggtaataaggacgaggagaccgctactacaatcgccgttcttattttttgatactggagtactttgctgacgtgcttaccctttagagacaactgatgcgagatgaacatcatctactacacggctcatagctgaaaacgaattcagaaccgcgatttaggggctgatctcgtgttttttctgttgacaactccctgttgtgcaaattagggcacatattcatagaatacttgacaaggccaaaaggttgttcttctctttttttgtaaggaacactacaagttacgctttctgacgtttttttgtaatattttcttgaccataagttgacgaggcacgacgaactttaccatgacgtgtgtctttctc

SEQ ID NO: 8-10000 - skipped (9993 entries)

SEQ ID NO: 10001 - DNA, 20 bp, synthetic construct
  source 1..20: mol_type = other DNA
gcttgcacaggtgtctacat

SEQ ID NO: 10002 - DNA, 20 bp, synthetic construct
  source 1..20: mol_type = other DNA
atacacgccttcaaacaaca

SEQ ID NO: 10003 - DNA, 20 bp, synthetic construct
  source 1..20: mol_type = other DNA
atctgcacaagtgcttgcac

SEQ ID NO: 10004 - DNA, 20 bp, synthetic construct
  source 1..20: mol_type = other DNA
aaatattcttgcgattgatc

SEQ ID NO: 10005 - DNA, 20 bp, synthetic construct
  source 1..20: mol_type = other DNA
ccaccaccatacacgatatc

SEQ ID NO: 10006 - DNA, 20 bp, synthetic construct
  source 1..20: mol_type = other DNA
cctgatatcgtgtatggtgg

SEQ ID NO: 10007 - DNA, 20 bp, synthetic construct
  source 1..20: mol_type = other DNA
cgcgctgccttcaaacaaca

SEQ ID NO: 10008 - DNA, 20 bp, synthetic construct
  source 1..20: mol_type = other DNA
cgtgaatcaacacattattg

SEQ ID NO: 10009 - DNA, 20 bp, synthetic construct
  source 1..20: mol_type = other DNA
ctacctgatatcgtgtatgg

SEQ ID NO: 10010 - DNA, 20 bp, synthetic construct
  source 1..20: mol_type = other DNA
gcgtgaatcaacacattatt

SEQ ID NO: 10011 - DNA, 20 bp, synthetic construct
  source 1..20: mol_type = other DNA
ggcgtgaatcaacacattat

SEQ ID NO: 10012 - DNA, 20 bp, synthetic construct
  source 1..20: mol_type = other DNA
tggatcattggactaccaag

SEQ ID NO: 10013 - DNA, 20 bp, synthetic construct
  source 1..20: mol_type = other DNA
ttaggtgcaacatggatcat

SEQ ID NO: 10014 - DNA, 20 bp, synthetic construct
  source 1..20: mol_type = other DNA
cagctcctaaatctatacaa

SEQ ID NO: 10015 - DNA, 20 bp, synthetic construct
  source 1..20: mol_type = other DNA
caagtatgatgaatcgtaat

SEQ ID NO: 10016 - DNA, 20 bp, synthetic construct
  source 1..20: mol_type = other DNA
aagtatgatgaatcgtaatt

SEQ ID NO: 10017 - DNA, 20 bp, synthetic construct
  source 1..20: mol_type = other DNA
agtatgatgaatcgtaattg

SEQ ID NO: 10018 - DNA, 20 bp, synthetic construct
  source 1..20: mol_type = other DNA
agtggagagcattgtgttcg

SEQ ID NO: 10019 - DNA, 20 bp, synthetic construct
  source 1..20: mol_type = other DNA
gaaccgatgactgtacaggt

SEQ ID NO: 10020 - DNA, 20 bp, synthetic construct
  source 1..20: mol_type = other DNA
aaccgatgactgtacaggtt

SEQ ID NO: 10021 - DNA, 20 bp, synthetic construct
  source 1..20: mol_type = other DNA
tgtacaggttgggaatatgt

SEQ ID NO: 10022 - DNA, 20 bp, synthetic construct
  source 1..20: mol_type = other DNA
atataataatccacatcacc

SEQ ID NO: 10023 - DNA, 20 bp, synthetic construct
  source 1..20: mol_type = other DNA
catcacccggttcttaaata

SEQ ID NO: 10024 - DNA, 20 bp, synthetic construct
  source 1..20: mol_type = other DNA
cccggttcttaaatatggta

SEQ ID NO: 10025 - DNA, 20 bp, synthetic construct
  source 1..20: mol_type = other DNA
taacattgctcgattagcgt

SEQ ID NO: 10026 - DNA, 20 bp, synthetic construct
  source 1..20: mol_type = other DNA
cgctatgccataccaatatt

SEQ ID NO: 10027 - DNA, 20 bp, synthetic construct
  source 1..20: mol_type = other DNA
actctccatacagcatcagt

SEQ ID NO: 10028 - DNA, 20 bp, synthetic construct
  source 1..20: mol_type = other DNA
ctctccatacagcatcagtt

SEQ ID NO: 10029 - DNA, 20 bp, synthetic construct
  source 1..20: mol_type = other DNA
agtcccaacagaatctacaa

SEQ ID NO: 10030 - DNA, 20 bp, synthetic construct
  source 1..20: mol_type = other DNA
gtgaatcatacagtgttcca

SEQ ID NO: 10031 - DNA, 20 bp, synthetic construct
  source 1..20: mol_type = other DNA
aatcggtgtggacgattgtg

SEQ ID NO: 10032 - DNA, 20 bp, synthetic construct
  source 1..20: mol_type = other DNA
tgtggacgattgtgaggtac

SEQ ID NO: 10033 - DNA, 20 bp, synthetic construct
  source 1..20: mol_type = other DNA
tatccaagttcttcttgtgg

SEQ ID NO: 10034 - DNA, 20 bp, synthetic construct
  source 1..20: mol_type = other DNA
ctaagacctgattggccagc

SEQ ID NO: 10035 - DNA, 20 bp, synthetic construct
  source 1..20: mol_type = other DNA
gatgaagttgtccaacgagc

SEQ ID NO: 10036 - DNA, 20 bp, synthetic construct
  source 1..20: mol_type = other DNA
caacgagctggcttgagacc

SEQ ID NO: 10037 - DNA, 20 bp, synthetic construct
  source 1..20: mol_type = other DNA
ttgtaaggattccaagacca

SEQ ID NO: 10038 - DNA, 20 bp, synthetic construct
  source 1..20: mol_type = other DNA
cagtattcgagttcttcctc

SEQ ID NO: 10039 - DNA, 20 bp, synthetic construct
  source 1..20: mol_type = other DNA
tattcgagttcttcctctgg

SEQ ID NO: 10040 - DNA, 20 bp, synthetic construct
  source 1..20: mol_type = other DNA
gagttgacttgaaacctggc

SEQ ID NO: 10041 - DNA, 20 bp, synthetic construct
  source 1..20: mol_type = other DNA
attatacatagtgatcatag

SEQ ID NO: 10042 - DNA, 20 bp, synthetic construct
  source 1..20: mol_type = other DNA
aactagttccaaatgaatat

SEQ ID NO: 10043 - DNA, 20 bp, synthetic construct
  source 1..20: mol_type = other DNA
ttctggaattatacgatgtc

SEQ ID NO: 10044 - DNA, 20 bp, synthetic construct
  source 1..20: mol_type = other DNA
tatacgatgtcaggcttatc

SEQ ID NO: 10045 - DNA, 20 bp, synthetic construct
  source 1..20: mol_type = other DNA
cttatctggacataacgtac

SEQ ID NO: 10046 - DNA, 20 bp, synthetic construct
  source 1..20: mol_type = other DNA
ggataacaacgtccgtgtca

SEQ ID NO: 10047 - DNA, 20 bp, synthetic construct
  source 1..20: mol_type = other DNA
gtagccctaaatggtataaa

SEQ ID NO: 10048 - DNA, 20 bp, synthetic construct
  source 1..20: mol_type = other DNA
cttgttaaatgtcgtgaatg

SEQ ID NO: 10049 - DNA, 20 bp, synthetic construct
  source 1..20: mol_type = other DNA
ttgttaaatgtcgtgaatgt

SEQ ID NO: 10050 - DNA, 20 bp, synthetic construct
  source 1..20: mol_type = other DNA
gttgataccttgataagaat

SEQ ID NO: 10051 - DNA, 20 bp, synthetic construct
  source 1..20: mol_type = other DNA
taccttgataagaatgggtg

SEQ ID NO: 10052 - DNA, 20 bp, synthetic construct
  source 1..20: mol_type = other DNA
gtaccatgttgctgtctgtt

SEQ ID NO: 10053 - DNA, 20 bp, synthetic construct
  source 1..20: mol_type = other DNA
acagtagtgacataagctaa

SEQ ID NO: 10054 - DNA, 20 bp, synthetic construct
  source 1..20: mol_type = other DNA
atagttataattcttgcgac

SEQ ID NO: 10055 - DNA, 20 bp, synthetic construct
  source 1..20: mol_type = other DNA
tacaacgattaggactgtat

SEQ ID NO: 10056 - DNA, 20 bp, synthetic construct
  source 1..20: mol_type = other DNA
acgaccacatactcatacga

SEQ ID NO: 10057 - DNA, 20 bp, synthetic construct
  source 1..20: mol_type = other DNA
cgaccacatactcatacgac

SEQ ID NO: 10058 - DNA, 20 bp, synthetic construct
  source 1..20: mol_type = other DNA
caccaacgaggccttaagaa

SEQ ID NO: 10059 - DNA, 20 bp, synthetic construct
  source 1..20: mol_type = other DNA
aacgaggccttaagaatggc

SEQ ID NO: 10060 - DNA, 20 bp, synthetic construct
  source 1..20: mol_type = other DNA
aaagctcttgttactgtgga

SEQ ID NO: 10061 - DNA, 20 bp, synthetic construct
  source 1..20: mol_type = other DNA
aatcttcattacgccgtcat

SEQ ID NO: 10062 - DNA, 20 bp, synthetic construct
  source 1..20: mol_type = other DNA
agaggtatgatgtccttaaa

SEQ ID NO: 10063 - DNA, 20 bp, synthetic construct
  source 1..20: mol_type = other DNA
ctcgagaagacagcggccaa

SEQ ID NO: 10064 - DNA, 20 bp, synthetic construct
  source 1..20: mol_type = other DNA
gatagagtatgagtccacct

SEQ ID NO: 10065 - DNA, 20 bp, synthetic construct
  source 1..20: mol_type = other DNA
gacgaaagtgaggacgatca

SEQ ID NO: 10066 - DNA, 20 bp, synthetic construct
  source 1..20: mol_type = other DNA
tccggaaagagtcattaaga

SEQ ID NO: 10067 - DNA, 20 bp, synthetic construct
  source 1..20: mol_type = other DNA
acaccataaagtacgaacat

SEQ ID NO: 10068 - DNA, 20 bp, synthetic construct
  source 1..20: mol_type = other DNA
aaacttattatacggcgaaa

SEQ ID NO: 10069 - DNA, 20 bp, synthetic construct
  source 1..20: mol_type = other DNA
ttgtaaggactgttacaaac

SEQ ID NO: 10070 - DNA, 20 bp, synthetic construct
  source 1..20: mol_type = other DNA
gactatgtattgcaactgtt

SEQ ID NO: 10071 - DNA, 20 bp, synthetic construct
  source 1..20: mol_type = other DNA
ggactgcactggcaagatca

SEQ ID NO: 10072 - DNA, 20 bp, synthetic construct
  source 1..20: mol_type = other DNA
ctcaaagtagcagcatcgga

SEQ ID NO: 10073 - DNA, 20 bp, synthetic construct
  source 1..20: mol_type = other DNA
tcgtagagctgttgttgtca

SEQ ID NO: 10074 - DNA, 20 bp, synthetic construct
  source 1..20: mol_type = other DNA
cgtagagctgttgttgtcat

SEQ ID NO: 10075 - DNA, 20 bp, synthetic construct
  source 1..20: mol_type = other DNA
caaccagatgctgttcgaac

SEQ ID NO: 10076 - DNA, 20 bp, synthetic construct
  source 1..20: mol_type = other DNA
gaatatacgttacaagtgct

SEQ ID NO: 10077 - DNA, 20 bp, synthetic construct
  source 1..20: mol_type = other DNA
acaagtgctagggctatact

SEQ ID NO: 10078 - DNA, 20 bp, synthetic construct
  source 1..20: mol_type = other DNA
ttaagaatcgcagcttcaga

SEQ ID NO: 10079 - DNA, 20 bp, synthetic construct
  source 1..20: mol_type = other DNA
atcgcagcttcagagggcaa

SEQ ID NO: 10080 - DNA, 20 bp, synthetic construct
  source 1..20: mol_type = other DNA
cagcttcagagggcaacggt

SEQ ID NO: 10081 - DNA, 20 bp, synthetic construct
  source 1..20: mol_type = other DNA
gtgatcataggagctctaga

SEQ ID NO: 10082 - DNA, 20 bp, synthetic construct
  source 1..20: mol_type = other DNA
tacgacctgattcataagta

SEQ ID NO: 10083 - DNA, 20 bp, synthetic construct
  source 1..20: mol_type = other DNA
agttatccaattgtgatatg

SEQ ID NO: 10084 - DNA, 20 bp, synthetic construct
  source 1..20: mol_type = other DNA
aaccctaatgttaaatgagc

SEQ ID NO: 10085 - DNA, 20 bp, synthetic construct
  source 1..20: mol_type = other DNA
ttcagcgactaggtctgtac

SEQ ID NO: 10086 - DNA, 20 bp, synthetic construct
  source 1..20: mol_type = other DNA
tcagcgactaggtctgtact

SEQ ID NO: 10087 - DNA, 20 bp, synthetic construct
  source 1..20: mol_type = other DNA
cgactatgtacttatacaac

SEQ ID NO: 10088 - DNA, 20 bp, synthetic construct
  source 1..20: mol_type = other DNA
tggtacaactcctattacta

SEQ ID NO: 10089 - DNA, 20 bp, synthetic construct
  source 1..20: mol_type = other DNA
ggtacaactcctattactat

SEQ ID NO: 10090 - DNA, 20 bp, synthetic construct
  source 1..20: mol_type = other DNA
acaactcctattactatggg

SEQ ID NO: 10091 - DNA, 20 bp, synthetic construct
  source 1..20: mol_type = other DNA
caactcctattactatggga

SEQ ID NO: 10092 - DNA, 20 bp, synthetic construct
  source 1..20: mol_type = other DNA
ttatgccatcataggagctt

SEQ ID NO: 10093 - DNA, 20 bp, synthetic construct
  source 1..20: mol_type = other DNA
tcttgaatgggctgccggca

SEQ ID NO: 10094 - DNA, 20 bp, synthetic construct
  source 1..20: mol_type = other DNA
cttgaatgggctgccggcat

SEQ ID NO: 10095 - DNA, 20 bp, synthetic construct
  source 1..20: mol_type = other DNA
aaatggctgcgcgagaatcg

SEQ ID NO: 10096 - DNA, 20 bp, synthetic construct
  source 1..20: mol_type = other DNA
aatggctgcgcgagaatcga

SEQ ID NO: 10097 - DNA, 20 bp, synthetic construct
  source 1..20: mol_type = other DNA
ggctgcgcgagaatcgaggg

SEQ ID NO: 10098 - DNA, 20 bp, synthetic construct
  source 1..20: mol_type = other DNA
tatactatgcgacataaaga

SEQ ID NO: 10099 - DNA, 20 bp, synthetic construct
  source 1..20: mol_type = other DNA
ttagcaagcatactctacaa

SEQ ID NO: 10100 - DNA, 20 bp, synthetic construct
  source 1..20: mol_type = other DNA
caagcatactctacaacggc

SEQ ID NO: 10101 - DNA, 20 bp, synthetic construct
  source 1..20: mol_type = other DNA
aagcatactctacaacggct

SEQ ID NO: 10102 - DNA, 20 bp, synthetic construct
  source 1..20: mol_type = other DNA
tggtacagctcttgttacta

SEQ ID NO: 10103 - DNA, 20 bp, synthetic construct
  source 1..20: mol_type = other DNA
ggtacagctcttgttactat

SEQ ID NO: 10104 - DNA, 20 bp, synthetic construct
  source 1..20: mol_type = other DNA
acagctcttgttactatggg

SEQ ID NO: 10105 - DNA, 20 bp, synthetic construct
  source 1..20: mol_type = other DNA
accatagccaaattcaggac

SEQ ID NO: 10106 - DNA, 20 bp, synthetic construct
  source 1..20: mol_type = other DNA
cttctgctaaatcgtcatat

SEQ ID NO: 10107 - DNA, 20 bp, synthetic construct
  source 1..20: mol_type = other DNA
gctaaatcgtcatattggta

SEQ ID NO: 10108 - DNA, 20 bp, synthetic construct
  source 1..20: mol_type = other DNA
tgagcccttaggcaagcatg

SEQ ID NO: 10109 - DNA, 20 bp, synthetic construct
  source 1..20: mol_type = other DNA
caagcatgtggttcaacggc

SEQ ID NO: 10110 - DNA, 20 bp, synthetic construct
  source 1..20: mol_type = other DNA
aagcatgtggttcaacggct

SEQ ID NO: 10111 - DNA, 20 bp, synthetic construct
  source 1..20: mol_type = other DNA
tcaacggctgggattatact

SEQ ID NO: 10112 - DNA, 20 bp, synthetic construct
  source 1..20: mol_type = other DNA
cggctgggattatactggga

SEQ ID NO: 10113 - DNA, 20 bp, synthetic construct
  source 1..20: mol_type = other DNA
ccatggttcacttaaacgag

SEQ ID NO: 10114 - DNA, 20 bp, synthetic construct
  source 1..20: mol_type = other DNA
catggttcacttaaacgagt

SEQ ID NO: 10115 - DNA, 20 bp, synthetic construct
  source 1..20: mol_type = other DNA
atacaaattgcagcctcgga

SEQ ID NO: 10116 - DNA, 20 bp, synthetic construct
  source 1..20: mol_type = other DNA
agtctacaatatgccatcat

SEQ ID NO: 10117 - DNA, 20 bp, synthetic construct
  source 1..20: mol_type = other DNA
tcataggagccttagagggc

SEQ ID NO: 10118 - DNA, 20 bp, synthetic construct
  source 1..20: mol_type = other DNA
ttaggctacatgcttcttct

SEQ ID NO: 10119 - DNA, 20 bp, synthetic construct
  source 1..20: mol_type = other DNA
tactccatgctgtagaatcg

SEQ ID NO: 10120 - DNA, 20 bp, synthetic construct
  source 1..20: mol_type = other DNA
actccatgctgtagaatcgc

SEQ ID NO: 10121 - DNA, 20 bp, synthetic construct
  source 1..20: mol_type = other DNA
ctgtagaatcgcgggcctcc

SEQ ID NO: 10122 - DNA, 20 bp, synthetic construct
  source 1..20: mol_type = other DNA
aagcatgtacttcaacaact

SEQ ID NO: 10123 - DNA, 20 bp, synthetic construct
  source 1..20: mol_type = other DNA
ttcaacaactagggctgtac

SEQ ID NO: 10124 - DNA, 20 bp, synthetic construct
  source 1..20: mol_type = other DNA
acaactagggctgtactgga

SEQ ID NO: 10125 - DNA, 20 bp, synthetic construct
  source 1..20: mol_type = other DNA
caactagggctgtactggaa

SEQ ID NO: 10126 - DNA, 20 bp, synthetic construct
  source 1..20: mol_type = other DNA
catggatctcttcaacgaat

SEQ ID NO: 10127 - DNA, 20 bp, synthetic construct
  source 1..20: mol_type = other DNA
ttaagaatggcggcagaaga

SEQ ID NO: 10128 - DNA, 20 bp, synthetic construct
  source 1..20: mol_type = other DNA
agtaaagctcttgttactgt

SEQ ID NO: 10129 - DNA, 20 bp, synthetic construct
  source 1..20: mol_type = other DNA
aatgacatcattagatggat

SEQ ID NO: 10130 - DNA, 20 bp, synthetic construct
  source 1..20: mol_type = other DNA
atcatatcaccttcgaactg

SEQ ID NO: 10131 - DNA, 20 bp, synthetic construct
  source 1..20: mol_type = other DNA
atatcaccttcgaactgcgg

SEQ ID NO: 10132 - DNA, 20 bp, synthetic construct
  source 1..20: mol_type = other DNA
caccttcgaactgcggcggc

SEQ ID NO: 10133 - DNA, 20 bp, synthetic construct
  source 1..20: mol_type = other DNA
cttcgaactgcggcggcagg

SEQ ID NO: 10134 - DNA, 20 bp, synthetic construct
  source 1..20: mol_type = other DNA
ccgttctatccgcggctatc

SEQ ID NO: 10135 - DNA, 20 bp, synthetic construct
  source 1..20: mol_type = other DNA
cggctatcaggtacaagcat

SEQ ID NO: 10136 - DNA, 20 bp, synthetic construct
  source 1..20: mol_type = other DNA
actgctactctatgctgtgc

SEQ ID NO: 10137 - DNA, 20 bp, synthetic construct
  source 1..20: mol_type = other DNA
aaatggctgcacgggaatcc

SEQ ID NO: 10138 - DNA, 20 bp, synthetic construct
  source 1..20: mol_type = other DNA
aaatgatctccaaagctgct

SEQ ID NO: 10139 - DNA, 20 bp, synthetic construct
  source 1..20: mol_type = other DNA
atgatctccaaagctgcttg

SEQ ID NO: 10140 - DNA, 20 bp, synthetic construct
  source 1..20: mol_type = other DNA
aataccatgaagcctcaatc

SEQ ID NO: 10141 - DNA, 20 bp, synthetic construct
  source 1..20: mol_type = other DNA
ctctaatatgctggtagcgg

SEQ ID NO: 10142 - DNA, 20 bp, synthetic construct
  source 1..20: mol_type = other DNA
taatatgctggtagcggagg

SEQ ID NO: 10143 - DNA, 20 bp, synthetic construct
  source 1..20: mol_type = other DNA
cgaatcataacgcggtaaac

SEQ ID NO: 10144 - DNA, 20 bp, synthetic construct
  source 1..20: mol_type = other DNA
aatcgaataaattcagatcc

SEQ ID NO: 10145 - DNA, 20 bp, synthetic construct
  source 1..20: mol_type = other DNA
cacctgcaatataaggccac

SEQ ID NO: 10146 - DNA, 20 bp, synthetic construct
  source 1..20: mol_type = other DNA
ctgcaatataaggccaccgg

SEQ ID NO: 10147 - DNA, 20 bp, synthetic construct
  source 1..20: mol_type = other DNA
ccggtggtcgtgtctggatt

SEQ ID NO: 10148 - DNA, 20 bp, synthetic construct
  source 1..20: mol_type = other DNA
cacaccattgattccctcga

SEQ ID NO: 10149 - DNA, 20 bp, synthetic construct
  source 1..20: mol_type = other DNA
ttccacgcatgattaataaa

SEQ ID NO: 10150 - DNA, 20 bp, synthetic construct
  source 1..20: mol_type = other DNA
tcctctggcgatgatgttag

SEQ ID NO: 10151 - DNA, 20 bp, synthetic construct
  source 1..20: mol_type = other DNA
tcatgaaacgactgcacgaa

SEQ ID NO: 10152 - DNA, 20 bp, synthetic construct
  source 1..20: mol_type = other DNA
catgaaacgactgcacgaat

SEQ ID NO: 10153 - DNA, 20 bp, synthetic construct
  source 1..20: mol_type = other DNA
gaatgctgcaatggtggaag

SEQ ID NO: 10154 - DNA, 20 bp, synthetic construct
  source 1..20: mol_type = other DNA
tgtcatggacgcattgaatg

SEQ ID NO: 10155 - DNA, 20 bp, synthetic construct
  source 1..20: mol_type = other DNA
cgtattgcggccttcatcac

SEQ ID NO: 10156 - DNA, 20 bp, synthetic construct
  source 1..20: mol_type = other DNA
gcatatccacatgaataccg

SEQ ID NO: 10157 - DNA, 20 bp, synthetic construct
  source 1..20: mol_type = other DNA
tcgcatctattgacaatcca

SEQ ID NO: 10158 - DNA, 20 bp, synthetic construct
  source 1..20: mol_type = other DNA
cccatatgtgcggtaattct

SEQ ID NO: 10159 - DNA, 20 bp, synthetic construct
  source 1..20: mol_type = other DNA
taggcttcttgaatacaggt

SEQ ID NO: 10160 - DNA, 20 bp, synthetic construct
  source 1..20: mol_type = other DNA
ggtcaagatcttcggcctgc

SEQ ID NO: 10161 - DNA, 20 bp, synthetic construct
  source 1..20: mol_type = other DNA
gccatcgcgttgcgaaacag

SEQ ID NO: 10162 - DNA, 20 bp, synthetic construct
  source 1..20: mol_type = other DNA
cgcgttgcgaaacagtggtt

SEQ ID NO: 10163 - DNA, 20 bp, synthetic construct
  source 1..20: mol_type = other DNA
gataaggcccgccaacacca

SEQ ID NO: 10164 - DNA, 20 bp, synthetic construct
  source 1..20: mol_type = other DNA
acgggttgtccaatcttgca

SEQ ID NO: 10165 - DNA, 20 bp, synthetic construct
  source 1..20: mol_type = other DNA
aggactccaggtccgacacc

SEQ ID NO: 10166 - DNA, 20 bp, synthetic construct
  source 1..20: mol_type = other DNA
tccaggtccgacacctggta

SEQ ID NO: 10167 - DNA, 20 bp, synthetic construct
  source 1..20: mol_type = other DNA
ccaaggaagtctctcgctgc

SEQ ID NO: 10168 - DNA, 20 bp, synthetic construct
  source 1..20: mol_type = other DNA
gaagtctctcgctgcgggta

SEQ ID NO: 10169 - DNA, 20 bp, synthetic construct
  source 1..20: mol_type = other DNA
gtctctcgctgcgggtaagg

SEQ ID NO: 10170 - DNA, 20 bp, synthetic construct
  source 1..20: mol_type = other DNA
gccctgcgtaccatagcgta

SEQ ID NO: 10171 - DNA, 20 bp, synthetic construct
  source 1..20: mol_type = other DNA
acaattctgacaccgatccg

SEQ ID NO: 10172 - DNA, 20 bp, synthetic construct
  source 1..20: mol_type = other DNA
caattctgacaccgatccgt

SEQ ID NO: 10173 - DNA, 20 bp, synthetic construct
  source 1..20: mol_type = other DNA
atcggataggcaacctctga

SEQ ID NO: 10174 - DNA, 20 bp, synthetic construct
  source 1..20: mol_type = other DNA
gacgccaaggcgtctgcaaa

SEQ ID NO: 10175 - DNA, 20 bp, synthetic construct
  source 1..20: mol_type = other DNA
tgaggataacctgtcgcggc

SEQ ID NO: 10176 - DNA, 20 bp, synthetic construct
  source 1..20: mol_type = other DNA
gaggataacctgtcgcggca

SEQ ID NO: 10177 - DNA, 20 bp, synthetic construct
  source 1..20: mol_type = other DNA
gcagggttgagtgagctatc

SEQ ID NO: 10178 - DNA, 20 bp, synthetic construct
  source 1..20: mol_type = other DNA
cagggttgagtgagctatca

SEQ ID NO: 10179 - DNA, 20 bp, synthetic construct
  source 1..20: mol_type = other DNA
caactccgcgtatagctccc

SEQ ID NO: 10180 - DNA, 20 bp, synthetic construct
  source 1..20: mol_type = other DNA
ttctcgcagatagtagcgaa

SEQ ID NO: 10181 - DNA, 20 bp, synthetic construct
  source 1..20: mol_type = other DNA
gttgagcaacacatgggtaa

SEQ ID NO: 10182 - DNA, 20 bp, synthetic construct
  source 1..20: mol_type = other DNA
gaaatcatccaccagtagcg

SEQ ID NO: 10183 - DNA, 20 bp, synthetic construct
  source 1..20: mol_type = other DNA
cagtagcgtggaggattggt

SEQ ID NO: 10184 - DNA, 20 bp, synthetic construct
  source 1..20: mol_type = other DNA
tagcgtggaggattggtagg

SEQ ID NO: 10185 - DNA, 20 bp, synthetic construct
  source 1..20: mol_type = other DNA
gtggcaatcacaagaagaga

SEQ ID NO: 10186 - DNA, 20 bp, synthetic construct
  source 1..20: mol_type = other DNA
ttccagagtctgccgtagta

SEQ ID NO: 10187 - DNA, 20 bp, synthetic construct
  source 1..20: mol_type = other DNA
gagtctgccgtagtagggac

SEQ ID NO: 10188 - DNA, 20 bp, synthetic construct
  source 1..20: mol_type = other DNA
tgccgtagtagggacaggcc

SEQ ID NO: 10189 - DNA, 20 bp, synthetic construct
  source 1..20: mol_type = other DNA
gtagggacaggcccggcacc

SEQ ID NO: 10190 - DNA, 20 bp, synthetic construct
  source 1..20: mol_type = other DNA
gcggcaggccatctgcagaa

SEQ ID NO: 10191 - DNA, 20 bp, synthetic construct
  source 1..20: mol_type = other DNA
cttccacaggagttatcacc

SEQ ID NO: 10192 - DNA, 20 bp, synthetic construct
  source 1..20: mol_type = other DNA
ttgcttatcagcggatcaga

SEQ ID NO: 10193 - DNA, 20 bp, synthetic construct
  source 1..20: mol_type = other DNA
ggaatcattcatctcataag

SEQ ID NO: 10194 - DNA, 20 bp, synthetic construct
  source 1..20: mol_type = other DNA
gaatcattcatctcataagt

SEQ ID NO: 10195 - DNA, 20 bp, synthetic construct
  source 1..20: mol_type = other DNA
aggttgtataagatccatca

SEQ ID NO: 10196 - DNA, 20 bp, synthetic construct
  source 1..20: mol_type = other DNA
agatccatcatggagcctag

SEQ ID NO: 10197 - DNA, 20 bp, synthetic construct
  source 1..20: mol_type = other DNA
aaactcctcttgaccgccgt

SEQ ID NO: 10198 - DNA, 20 bp, synthetic construct
  source 1..20: mol_type = other DNA
accgccgtgggaaatcatcc

SEQ ID NO: 10199 - DNA, 20 bp, synthetic construct
  source 1..20: mol_type = other DNA
ccgccgtgggaaatcatcca

SEQ ID NO: 10200 - DNA, 20 bp, synthetic construct
  source 1..20: mol_type = other DNA
gggaaatcatccagggtagt

SEQ ID NO: 10201 - DNA, 20 bp, synthetic construct
  source 1..20: mol_type = other DNA
gtatgccgtagtgatcaccg

SEQ ID NO: 10202 - DNA, 20 bp, synthetic construct
  source 1..20: mol_type = other DNA
cgtggactccagatggttat

SEQ ID NO: 10203 - DNA, 20 bp, synthetic construct
  source 1..20: mol_type = other DNA
agttcttaccaaactcgacc

SEQ ID NO: 10204 - DNA, 20 bp, synthetic construct
  source 1..20: mol_type = other DNA
tcttaccaaactcgaccagg

SEQ ID NO: 10205 - DNA, 20 bp, synthetic construct
  source 1..20: mol_type = other DNA
gagccagcgcggattctcat

SEQ ID NO: 10206 - DNA, 20 bp, synthetic construct
  source 1..20: mol_type = other DNA
agaaatgattagatgcccgg

SEQ ID NO: 10207 - DNA, 20 bp, synthetic construct
  source 1..20: mol_type = other DNA
cgttgtagaaatgtcacata

SEQ ID NO: 10208 - DNA, 20 bp, synthetic construct
  source 1..20: mol_type = other DNA
accctgctataaatatcagc

SEQ ID NO: 10209 - DNA, 20 bp, synthetic construct
  source 1..20: mol_type = other DNA
taatgcggccgcaccattca

SEQ ID NO: 10210 - DNA, 20 bp, synthetic construct
  source 1..20: mol_type = other DNA
agacttgctgagctgttccc

SEQ ID NO: 10211 - DNA, 20 bp, synthetic construct
  source 1..20: mol_type = other DNA
acacagttctgatactgcgt

SEQ ID NO: 10212 - DNA, 20 bp, synthetic construct
  source 1..20: mol_type = other DNA
ctcacccagagtgttcctgt

SEQ ID NO: 10213 - DNA, 20 bp, synthetic construct
  source 1..20: mol_type = other DNA
ttcgtcggcaacaacaaaga

SEQ ID NO: 10214 - DNA, 20 bp, synthetic construct
  source 1..20: mol_type = other DNA
tataccagttccaacattcg

SEQ ID NO: 10215 - DNA, 20 bp, synthetic construct
  source 1..20: mol_type = other DNA
agatagactatcgcaggcgc

SEQ ID NO: 10216 - DNA, 20 bp, synthetic construct
  source 1..20: mol_type = other DNA
ttatgactattcaacccttg

SEQ ID NO: 10217 - DNA, 20 bp, synthetic construct
  source 1..20: mol_type = other DNA
gtaccagctgcaccagtcaa

SEQ ID NO: 10218 - DNA, 20 bp, synthetic construct
  source 1..20: mol_type = other DNA
aacggcctcctccttctcaa

SEQ ID NO: 10219 - DNA, 20 bp, synthetic construct
  source 1..20: mol_type = other DNA
attacaagctgtccctcctg

SEQ ID NO: 10220 - DNA, 20 bp, synthetic construct
  source 1..20: mol_type = other DNA
ggtcatcatggaacgcccgc

SEQ ID NO: 10221 - DNA, 20 bp, synthetic construct
  source 1..20: mol_type = other DNA
cgcgtcgccattatgatcta

SEQ ID NO: 10222 - DNA, 20 bp, synthetic construct
  source 1..20: mol_type = other DNA
gccattatgatctatggaat

SEQ ID NO: 10223 - DNA, 20 bp, synthetic construct
  source 1..20: mol_type = other DNA
tcgcccaccatgttcaatgc

SEQ ID NO: 10224 - DNA, 20 bp, synthetic construct
  source 1..20: mol_type = other DNA
tcaggcggcggcggtggaat

SEQ ID NO: 10225 - DNA, 20 bp, synthetic construct
  source 1..20: mol_type = other DNA
tcacaatgctacgcgaacca

SEQ ID NO: 10226 - DNA, 20 bp, synthetic construct
  source 1..20: mol_type = other DNA
caatgctacgcgaaccaggg

SEQ ID NO: 10227 - DNA, 20 bp, synthetic construct
  source 1..20: mol_type = other DNA
aaccagggaggcctacgccc

SEQ ID NO: 10228 - DNA, 20 bp, synthetic construct
  source 1..20: mol_type = other DNA
accagggaggcctacgccct

SEQ ID NO: 10229 - DNA, 20 bp, synthetic construct
  source 1..20: mol_type = other DNA
ccaatctcaagtacggtcta

SEQ ID NO: 10230 - DNA, 20 bp, synthetic construct
  source 1..20: mol_type = other DNA
caatctcaagtacggtctat

SEQ ID NO: 10231 - DNA, 20 bp, synthetic construct
  source 1..20: mol_type = other DNA
gaagaccaaatacataacag

SEQ ID NO: 10232 - DNA, 20 bp, synthetic construct
  source 1..20: mol_type = other DNA
caaatacataacagaggcga

SEQ ID NO: 10233 - DNA, 20 bp, synthetic construct
  source 1..20: mol_type = other DNA
ataacagaggcgacggcacc

SEQ ID NO: 10234 - DNA, 20 bp, synthetic construct
  source 1..20: mol_type = other DNA
aaggtacaccggtgttacga

SEQ ID NO: 10235 - DNA, 20 bp, synthetic construct
  source 1..20: mol_type = other DNA
caccggtgttacgacggcca

SEQ ID NO: 10236 - DNA, 20 bp, synthetic construct
  source 1..20: mol_type = other DNA
aatatgcgtcaccgacctat

SEQ ID NO: 10237 - DNA, 20 bp, synthetic construct
  source 1..20: mol_type = other DNA
cgtcaccgacctattggcat

SEQ ID NO: 10238 - DNA, 20 bp, synthetic construct
  source 1..20: mol_type = other DNA
gtcaccgacctattggcatc

SEQ ID NO: 10239 - DNA, 20 bp, synthetic construct
  source 1..20: mol_type = other DNA
tcaccgacctattggcatcg

SEQ ID NO: 10240 - DNA, 20 bp, synthetic construct
  source 1..20: mol_type = other DNA
atccatgcggccctatacta

SEQ ID NO: 10241 - DNA, 20 bp, synthetic construct
  source 1..20: mol_type = other DNA
tccatgcggccctatactac

SEQ ID NO: 10242 - DNA, 20 bp, synthetic construct
  source 1..20: mol_type = other DNA
ccatgcggccctatactacg

SEQ ID NO: 10243 - DNA, 20 bp, synthetic construct
  source 1..20: mol_type = other DNA
gtctactgcaacccgaccta

SEQ ID NO: 10244 - DNA, 20 bp, synthetic construct
  source 1..20: mol_type = other DNA
tctactgcaacccgacctat

SEQ ID NO: 10245 - DNA, 20 bp, synthetic construct
  source 1..20: mol_type = other DNA
cccgacctatgggttcgctg

SEQ ID NO: 10246 - DNA, 20 bp, synthetic construct
  source 1..20: mol_type = other DNA
acgcgtggcacagacgacgc

SEQ ID NO: 10247 - DNA, 20 bp, synthetic construct
  source 1..20: mol_type = other DNA
cgacgcagggtgtgttaacg

SEQ ID NO: 10248 - DNA, 20 bp, synthetic construct
  source 1..20: mol_type = other DNA
aagctggtggcaactacggc

SEQ ID NO: 10249 - DNA, 20 bp, synthetic construct
  source 1..20: mol_type = other DNA
ctacggctggcggccatgca

SEQ ID NO: 10250 - DNA, 20 bp, synthetic construct
  source 1..20: mol_type = other DNA
gccatgcagggagttcgaaa

SEQ ID NO: 10251 - DNA, 20 bp, synthetic construct
  source 1..20: mol_type = other DNA
agttcgaaatggatatctca

SEQ ID NO: 10252 - DNA, 20 bp, synthetic construct
  source 1..20: mol_type = other DNA
tatacacgtagaacgttaag

SEQ ID NO: 10253 - DNA, 20 bp, synthetic construct
  source 1..20: mol_type = other DNA
atacacgtagaacgttaagc

SEQ ID NO: 10254 - DNA, 20 bp, synthetic construct
  source 1..20: mol_type = other DNA
tacacgtagaacgttaagcg

SEQ ID NO: 10255 - DNA, 20 bp, synthetic construct
  source 1..20: mol_type = other DNA
taccggccgagatccgtgat

SEQ ID NO: 10256 - DNA, 20 bp, synthetic construct
  source 1..20: mol_type = other DNA
ttatgaacctgaactaagcc

SEQ ID NO: 10257 - DNA, 20 bp, synthetic construct
  source 1..20: mol_type = other DNA
gtacttacggtgctcgtcct

SEQ ID NO: 10258 - DNA, 20 bp, synthetic construct
  source 1..20: mol_type = other DNA
ttacggtgctcgtcctaggc

SEQ ID NO: 10259 - DNA, 20 bp, synthetic construct
  source 1..20: mol_type = other DNA
ctctgagaaagcgtgtaatg

SEQ ID NO: 10260 - DNA, 20 bp, synthetic construct
  source 1..20: mol_type = other DNA
agcgtgtaatgcggactgcg

SEQ ID NO: 10261 - DNA, 20 bp, synthetic construct
  source 1..20: mol_type = other DNA
tgtagtaattacccttgtta

SEQ ID NO: 10262 - DNA, 20 bp, synthetic construct
  source 1..20: mol_type = other DNA
gttcattggtcaatatatta

SEQ ID NO: 10263 - DNA, 20 bp, synthetic construct
  source 1..20: mol_type = other DNA
acagcataatggcgtacata

SEQ ID NO: 10264 - DNA, 20 bp, synthetic construct
  source 1..20: mol_type = other DNA
atgatgctctgcatgttgca

SEQ ID NO: 10265 - DNA, 20 bp, synthetic construct
  source 1..20: mol_type = other DNA
catacgcaaataggtcttgc

SEQ ID NO: 10266 - DNA, 20 bp, synthetic construct
  source 1..20: mol_type = other DNA
cagtataaacaccttagcgc

SEQ ID NO: 10267 - DNA, 20 bp, synthetic construct
  source 1..20: mol_type = other DNA
aaacaccttagcgccggtgt

SEQ ID NO: 10268 - DNA, 20 bp, synthetic construct
  source 1..20: mol_type = other DNA
tagcgccggtgtcggcgacc

SEQ ID NO: 10269 - DNA, 20 bp, synthetic construct
  source 1..20: mol_type = other DNA
tcgagccatagatggtagta

SEQ ID NO: 10270 - DNA, 20 bp, synthetic construct
  source 1..20: mol_type = other DNA
cacgcacgcggcccaacatt

SEQ ID NO: 10271 - DNA, 20 bp, synthetic construct
  source 1..20: mol_type = other DNA
cgaaacacccgccgaaatcg

SEQ ID NO: 10272 - DNA, 20 bp, synthetic construct
  source 1..20: mol_type = other DNA
gaaacacccgccgaaatcgt

SEQ ID NO: 10273 - DNA, 20 bp, synthetic construct
  source 1..20: mol_type = other DNA
aaatcgtgggcgtatagata

SEQ ID NO: 10274 - DNA, 20 bp, synthetic construct
  source 1..20: mol_type = other DNA
gataaatgattgcaacagcc

SEQ ID NO: 10275 - DNA, 20 bp, synthetic construct
  source 1..20: mol_type = other DNA
tgaaataatacgtgtcatgc

SEQ ID NO: 10276 - DNA, 20 bp, synthetic construct
  source 1..20: mol_type = other DNA
aataagtaggtccacaggct

SEQ ID NO: 10277 - DNA, 20 bp, synthetic construct
  source 1..20: mol_type = other DNA
gtccacaggctcggctgtgg

SEQ ID NO: 10278 - DNA, 20 bp, synthetic construct
  source 1..20: mol_type = other DNA
gctcggctgtggaggttagc

SEQ ID NO: 10279 - DNA, 20 bp, synthetic construct
  source 1..20: mol_type = other DNA
tcgaaatgtcacaaaccgta

SEQ ID NO: 10280 - DNA, 20 bp, synthetic construct
  source 1..20: mol_type = other DNA
tggatagtatcgcaggaact

SEQ ID NO: 10281 - DNA, 20 bp, synthetic construct
  source 1..20: mol_type = other DNA
cgcgttagattgatgttata

SEQ ID NO: 10282 - DNA, 20 bp, synthetic construct
  source 1..20: mol_type = other DNA
tatcctctacggcttctcct

SEQ ID NO: 10283 - DNA, 20 bp, synthetic construct
  source 1..20: mol_type = other DNA
tatagaacgttacgatacca

SEQ ID NO: 10284 - DNA, 20 bp, synthetic construct
  source 1..20: mol_type = other DNA
caaccttatgaccgtcatga

SEQ ID NO: 10285 - DNA, 20 bp, synthetic construct
  source 1..20: mol_type = other DNA
gataaatggcactccacttc

SEQ ID NO: 10286 - DNA, 20 bp, synthetic construct
  source 1..20: mol_type = other DNA
caaacgagtcctcccgcctc

SEQ ID NO: 10287 - DNA, 20 bp, synthetic construct
  source 1..20: mol_type = other DNA
tgttcttcacgcgtagcgaa

SEQ ID NO: 10288 - DNA, 20 bp, synthetic construct
  source 1..20: mol_type = other DNA
gttcttcacgcgtagcgaat

SEQ ID NO: 10289 - DNA, 20 bp, synthetic construct
  source 1..20: mol_type = other DNA
accagaaattcaggccatat

SEQ ID NO: 10290 - DNA, 20 bp, synthetic construct
  source 1..20: mol_type = other DNA
gatcgaaagattgcatgccg

SEQ ID NO: 10291 - DNA, 20 bp, synthetic construct
  source 1..20: mol_type = other DNA
atcgaaagattgcatgccga

SEQ ID NO: 10292 - DNA, 20 bp, synthetic construct
  source 1..20: mol_type = other DNA
tccaaatctggttcctccag

SEQ ID NO: 10293 - DNA, 20 bp, synthetic construct
  source 1..20: mol_type = other DNA
tggaacaattagccttgtgc

SEQ ID NO: 10294 - DNA, 20 bp, synthetic construct
  source 1..20: mol_type = other DNA
ggaacaattagccttgtgct

SEQ ID NO: 10295 - DNA, 20 bp, synthetic construct
  source 1..20: mol_type = other DNA
agcacacagttatctgacgt

SEQ ID NO: 10296 - DNA, 20 bp, synthetic construct
  source 1..20: mol_type = other DNA
gacaagacgcttatccttgc

SEQ ID NO: 10297 - DNA, 20 bp, synthetic construct
  source 1..20: mol_type = other DNA
aagacgcttatccttgcggg

SEQ ID NO: 10298 - DNA, 20 bp, synthetic construct
  source 1..20: mol_type = other DNA
tactctgctaaaccaggcct

SEQ ID NO: 10299 - DNA, 20 bp, synthetic construct
  source 1..20: mol_type = other DNA
atgtataagctagatcccat

SEQ ID NO: 10300 - DNA, 20 bp, synthetic construct
  source 1..20: mol_type = other DNA
tgtataagctagatcccatt

SEQ ID NO: 10301 - DNA, 20 bp, synthetic construct
  source 1..20: mol_type = other DNA
gcaaagattgttgaagaagg

SEQ ID NO: 10302 - DNA, 20 bp, synthetic construct
  source 1..20: mol_type = other DNA
cggaatagctgaagcctcag

SEQ ID NO: 10303 - DNA, 20 bp, synthetic construct
  source 1..20: mol_type = other DNA
tcaccaagattcccaaccat

SEQ ID NO: 10304 - DNA, 20 bp, synthetic construct
  source 1..20: mol_type = other DNA
tccgcgaagattggaaatag

SEQ ID NO: 10305 - DNA, 20 bp, synthetic construct
  source 1..20: mol_type = other DNA
ccgcgaagattggaaatagc

SEQ ID NO: 10306 - DNA, 20 bp, synthetic construct
  source 1..20: mol_type = other DNA
cgaagattggaaatagcggg

SEQ ID NO: 10307 - DNA, 20 bp, synthetic construct
  source 1..20: mol_type = other DNA
gaagattggaaatagcgggc

SEQ ID NO: 10308 - DNA, 20 bp, synthetic construct
  source 1..20: mol_type = other DNA
ggaaatagcgggcgggaaga

SEQ ID NO: 10309 - DNA, 20 bp, synthetic construct
  source 1..20: mol_type = other DNA
aatagcgggcgggaagaagg

SEQ ID NO: 10310 - DNA, 20 bp, synthetic construct
  source 1..20: mol_type = other DNA
acccgtcagcgaatcgttgt

SEQ ID NO: 10311 - DNA, 20 bp, synthetic construct
  source 1..20: mol_type = other DNA
cgtcagcgaatcgttgttgg

SEQ ID NO: 10312 - DNA, 20 bp, synthetic construct
  source 1..20: mol_type = other DNA
tccgctcttgcctacaaatc

SEQ ID NO: 10313 - DNA, 20 bp, synthetic construct
  source 1..20: mol_type = other DNA
tgcctacaaatccggaatta

SEQ ID NO: 10314 - DNA, 20 bp, synthetic construct
  source 1..20: mol_type = other DNA
atagtagatatgtacaacac

SEQ ID NO: 10315 - DNA, 20 bp, synthetic construct
  source 1..20: mol_type = other DNA
accctaacgcgctcataaag

SEQ ID NO: 10316 - DNA, 20 bp, synthetic construct
  source 1..20: mol_type = other DNA
ccctaacgcgctcataaagt

SEQ ID NO: 10317 - DNA, 20 bp, synthetic construct
  source 1..20: mol_type = other DNA
cacggatgtaatattaacat

SEQ ID NO: 10318 - DNA, 20 bp, synthetic construct
  source 1..20: mol_type = other DNA
ttcgtgttgaaatacgatgg

SEQ ID NO: 10319 - DNA, 20 bp, synthetic construct
  source 1..20: mol_type = other DNA
gctatctaccatgccgatat

SEQ ID NO: 10320 - DNA, 20 bp, synthetic construct
  source 1..20: mol_type = other DNA
ctaccatgccgatatcggcc

SEQ ID NO: 10321 - DNA, 20 bp, synthetic construct
  source 1..20: mol_type = other DNA
gggatgactcgcgttataga

SEQ ID NO: 10322 - DNA, 20 bp, synthetic construct
  source 1..20: mol_type = other DNA
tgactcgcgttatagatggc

SEQ ID NO: 10323 - DNA, 20 bp, synthetic construct
  source 1..20: mol_type = other DNA
cgtccaacggctggcctgtg

SEQ ID NO: 10324 - DNA, 20 bp, synthetic construct
  source 1..20: mol_type = other DNA
gtccaacggctggcctgtga

SEQ ID NO: 10325 - DNA, 20 bp, synthetic construct
  source 1..20: mol_type = other DNA
ctggcctgtgagggcatccg

SEQ ID NO: 10326 - DNA, 20 bp, synthetic construct
  source 1..20: mol_type = other DNA
cgtgggcccatagcttgcaa

SEQ ID NO: 10327 - DNA, 20 bp, synthetic construct
  source 1..20: mol_type = other DNA
catagcttgcaacggcgtat

SEQ ID NO: 10328 - DNA, 20 bp, synthetic construct
  source 1..20: mol_type = other DNA
tgcaggcgctggtgataggt

SEQ ID NO: 10329 - DNA, 20 bp, synthetic construct
  source 1..20: mol_type = other DNA
ataggtcggtcctatgaaga

SEQ ID NO: 10330 - DNA, 20 bp, synthetic construct
  source 1..20: mol_type = other DNA
ggccgcatcaaagtactcgc

SEQ ID NO: 10331 - DNA, 20 bp, synthetic construct
  source 1..20: mol_type = other DNA
catcaaagtactcgccggtc

SEQ ID NO: 10332 - DNA, 20 bp, synthetic construct
  source 1..20: mol_type = other DNA
ttgaccgttggtcattcggg

SEQ ID NO: 10333 - DNA, 20 bp, synthetic construct
  source 1..20: mol_type = other DNA
tgaccgttggtcattcggga

SEQ ID NO: 10334 - DNA, 20 bp, synthetic construct
  source 1..20: mol_type = other DNA
tcattcgggagggatgtgag

SEQ ID NO: 10335 - DNA, 20 bp, synthetic construct
  source 1..20: mol_type = other DNA
ttcgggagggatgtgagtgg

SEQ ID NO: 10336 - DNA, 20 bp, synthetic construct
  source 1..20: mol_type = other DNA
gaggccaaagatctcgtcat

SEQ ID NO: 10337 - DNA, 20 bp, synthetic construct
  source 1..20: mol_type = other DNA
aggccaaagatctcgtcatt

SEQ ID NO: 10338 - DNA, 20 bp, synthetic construct
  source 1..20: mol_type = other DNA
agatctcgtcattgggccca

SEQ ID NO: 10339 - DNA, 20 bp, synthetic construct
  source 1..20: mol_type = other DNA
gatctcgtcattgggcccat

SEQ ID NO: 10340 - DNA, 20 bp, synthetic construct
  source 1..20: mol_type = other DNA
atctcgtcattgggcccatg

SEQ ID NO: 10341 - DNA, 20 bp, synthetic construct
  source 1..20: mol_type = other DNA
acgcatcacagcatccacga

SEQ ID NO: 10342 - DNA, 20 bp, synthetic construct
  source 1..20: mol_type = other DNA
atcacagcatccacgacggc

SEQ ID NO: 10343 - DNA, 20 bp, synthetic construct
  source 1..20: mol_type = other DNA
cgaagccgtacatgacagac

SEQ ID NO: 10344 - DNA, 20 bp, synthetic construct
  source 1..20: mol_type = other DNA
ttcttctcggtagaaggtgc

SEQ ID NO: 10345 - DNA, 20 bp, synthetic construct
  source 1..20: mol_type = other DNA
gtagccgccgtagatcatat

SEQ ID NO: 10346 - DNA, 20 bp, synthetic construct
  source 1..20: mol_type = other DNA
gtagatcatataggccacaa

SEQ ID NO: 10347 - DNA, 20 bp, synthetic construct
  source 1..20: mol_type = other DNA
acaatggtattaagcccgtt

SEQ ID NO: 10348 - DNA, 20 bp, synthetic construct
  source 1..20: mol_type = other DNA
cataagtaacacgagcaggt

SEQ ID NO: 10349 - DNA, 20 bp, synthetic construct
  source 1..20: mol_type = other DNA
ataagtaacacgagcaggtt

SEQ ID NO: 10350 - DNA, 20 bp, synthetic construct
  source 1..20: mol_type = other DNA
gcgtagctcgatgatagaga

SEQ ID NO: 10351 - DNA, 20 bp, synthetic construct
  source 1..20: mol_type = other DNA
ggcctctgcggccttgtaac

SEQ ID NO: 10352 - DNA, 20 bp, synthetic construct
  source 1..20: mol_type = other DNA
ttattatctacaatgagcag

SEQ ID NO: 10353 - DNA, 20 bp, synthetic construct
  source 1..20: mol_type = other DNA
taccatgctatcccagtaga

SEQ ID NO: 10354 - DNA, 20 bp, synthetic construct
  source 1..20: mol_type = other DNA
tcccagtagatggtggtatg

SEQ ID NO: 10355 - DNA, 20 bp, synthetic construct
  source 1..20: mol_type = other DNA
gatgcacaatcttgccctca

SEQ ID NO: 10356 - DNA, 20 bp, synthetic construct
  source 1..20: mol_type = other DNA
ataccgctgagcaagctcaa

SEQ ID NO: 10357 - DNA, 20 bp, synthetic construct
  source 1..20: mol_type = other DNA
cgttgataaatacgcgcgct

SEQ ID NO: 10358 - DNA, 20 bp, synthetic construct
  source 1..20: mol_type = other DNA
tcggctaactgttgaatggc

SEQ ID NO: 10359 - DNA, 20 bp, synthetic construct
  source 1..20: mol_type = other DNA
gaatggccggatctgataga

SEQ ID NO: 10360 - DNA, 20 bp, synthetic construct
  source 1..20: mol_type = other DNA
taacgaaagtacttctccag

SEQ ID NO: 10361 - DNA, 20 bp, synthetic construct
  source 1..20: mol_type = other DNA
ttctccagcggtacagacat

SEQ ID NO: 10362 - DNA, 20 bp, synthetic construct
  source 1..20: mol_type = other DNA
ggtacagacattggcggtaa

SEQ ID NO: 10363 - DNA, 20 bp, synthetic construct
  source 1..20: mol_type = other DNA
ttcaccagtatcggctgact

SEQ ID NO: 10364 - DNA, 20 bp, synthetic construct
  source 1..20: mol_type = other DNA
tgggctacgcagatgtatcc

SEQ ID NO: 10365 - DNA, 20 bp, synthetic construct
  source 1..20: mol_type = other DNA
ttccatactgcgattgagat

SEQ ID NO: 10366 - DNA, 20 bp, synthetic construct
  source 1..20: mol_type = other DNA
catactgcgattgagatcgg

SEQ ID NO: 10367 - DNA, 20 bp, synthetic construct
  source 1..20: mol_type = other DNA
actgcgattgagatcggagg

SEQ ID NO: 10368 - DNA, 20 bp, synthetic construct
  source 1..20: mol_type = other DNA
ccctgagccgtgcacccgct

SEQ ID NO: 10369 - DNA, 20 bp, synthetic construct
  source 1..20: mol_type = other DNA
agccgtgcacccgcttggtg

SEQ ID NO: 10370 - DNA, 20 bp, synthetic construct
  source 1..20: mol_type = other DNA
gcttggtgcggtagctatca

SEQ ID NO: 10371 - DNA, 20 bp, synthetic construct
  source 1..20: mol_type = other DNA
gcggtagctatcacggtccg

SEQ ID NO: 10372 - DNA, 20 bp, synthetic construct
  source 1..20: mol_type = other DNA
cggtagctatcacggtccgt

SEQ ID NO: 10373 - DNA, 20 bp, synthetic construct
  source 1..20: mol_type = other DNA
tagctatcacggtccgtggg

SEQ ID NO: 10374 - DNA, 20 bp, synthetic construct
  source 1..20: mol_type = other DNA
gtacacgtgtatctgcggtt

SEQ ID NO: 10375 - DNA, 20 bp, synthetic construct
  source 1..20: mol_type = other DNA
cggttcggctcgtgttggac

SEQ ID NO: 10376 - DNA, 20 bp, synthetic construct
  source 1..20: mol_type = other DNA
tgttggaccggttgaaatat

SEQ ID NO: 10377 - DNA, 20 bp, synthetic construct
  source 1..20: mol_type = other DNA
gttggaccggttgaaatatg

SEQ ID NO: 10378 - DNA, 20 bp, synthetic construct
  source 1..20: mol_type = other DNA
tctatcatgaaggtattcac

SEQ ID NO: 10379 - DNA, 20 bp, synthetic construct
  source 1..20: mol_type = other DNA
tattcccttgttgcatggta

SEQ ID NO: 10380 - DNA, 20 bp, synthetic construct
  source 1..20: mol_type = other DNA
tcgggctataaagtagccgc

SEQ ID NO: 10381 - DNA, 20 bp, synthetic construct
  source 1..20: mol_type = other DNA
cgggctataaagtagccgcc

SEQ ID NO: 10382 - DNA, 20 bp, synthetic construct
  source 1..20: mol_type = other DNA
aagtagccgccgggttcatt

SEQ ID NO: 10383 - DNA, 20 bp, synthetic construct
  source 1..20: mol_type = other DNA
agtagccgccgggttcatta

SEQ ID NO: 10384 - DNA, 20 bp, synthetic construct
  source 1..20: mol_type = other DNA
acctcggcggctagattaac

SEQ ID NO: 10385 - DNA, 20 bp, synthetic construct
  source 1..20: mol_type = other DNA
cctcggcggctagattaaca

SEQ ID NO: 10386 - DNA, 20 bp, synthetic construct
  source 1..20: mol_type = other DNA
tagattaacagggcccgaat

SEQ ID NO: 10387 - DNA, 20 bp, synthetic construct
  source 1..20: mol_type = other DNA
taacagggcccgaataggaa

SEQ ID NO: 10388 - DNA, 20 bp, synthetic construct
  source 1..20: mol_type = other DNA
tgtaagctcctcattatcca

SEQ ID NO: 10389 - DNA, 20 bp, synthetic construct
  source 1..20: mol_type = other DNA
tatcacggcaacggaaccag

SEQ ID NO: 10390 - DNA, 20 bp, synthetic construct
  source 1..20: mol_type = other DNA
caacactccaagtccgtcat

SEQ ID NO: 10391 - DNA, 20 bp, synthetic construct
  source 1..20: mol_type = other DNA
acactccaagtccgtcatag

SEQ ID NO: 10392 - DNA, 20 bp, synthetic construct
  source 1..20: mol_type = other DNA
atcgtattgagtcttatcct

SEQ ID NO: 10393 - DNA, 20 bp, synthetic construct
  source 1..20: mol_type = other DNA
gtattgagtcttatcctagg

SEQ ID NO: 10394 - DNA, 20 bp, synthetic construct
  source 1..20: mol_type = other DNA
ttgagtcttatcctaggtgg

SEQ ID NO: 10395 - DNA, 20 bp, synthetic construct
  source 1..20: mol_type = other DNA
agtcttatcctaggtggcgg

SEQ ID NO: 10396 - DNA, 20 bp, synthetic construct
  source 1..20: mol_type = other DNA
tattcttcttaatgaggtga

SEQ ID NO: 10397 - DNA, 20 bp, synthetic construct
  source 1..20: mol_type = other DNA
ggtagtattgatatgttcaa

SEQ ID NO: 10398 - DNA, 20 bp, synthetic construct
  source 1..20: mol_type = other DNA
gcaattgtgagcttccagga

SEQ ID NO: 10399 - DNA, 20 bp, synthetic construct
  source 1..20: mol_type = other DNA
cagttcggaaacagatgccc

SEQ ID NO: 10400 - DNA, 20 bp, synthetic construct
  source 1..20: mol_type = other DNA
gatgccctggaagaccacta

SEQ ID NO: 10401 - DNA, 20 bp, synthetic construct
  source 1..20: mol_type = other DNA
atccatctatataccgctga

SEQ ID NO: 10402 - DNA, 20 bp, synthetic construct
  source 1..20: mol_type = other DNA
catctatataccgctgacgg

SEQ ID NO: 10403 - DNA, 20 bp, synthetic construct
  source 1..20: mol_type = other DNA
ctgacggaggtattaatgta

SEQ ID NO: 10404 - DNA, 20 bp, synthetic construct
  source 1..20: mol_type = other DNA
ttgttgagccttagcaaagg

SEQ ID NO: 10405 - DNA, 20 bp, synthetic construct
  source 1..20: mol_type = other DNA
ttaccaaacctacctcctct

SEQ ID NO: 10406 - DNA, 20 bp, synthetic construct
  source 1..20: mol_type = other DNA
aggaatgtggcatggagatc

SEQ ID NO: 10407 - DNA, 20 bp, synthetic construct
  source 1..20: mol_type = other DNA
gataacttcgccaccgcact

SEQ ID NO: 10408 - DNA, 20 bp, synthetic construct
  source 1..20: mol_type = other DNA
tactgtcctaatgattgggt

SEQ ID NO: 10409 - DNA, 20 bp, synthetic construct
  source 1..20: mol_type = other DNA
aacaatacggtaatattacg

SEQ ID NO: 10410 - DNA, 20 bp, synthetic construct
  source 1..20: mol_type = other DNA
acaattaatgatacatatgg

SEQ ID NO: 10411 - DNA, 20 bp, synthetic construct
  source 1..20: mol_type = other DNA
tactgctatgacgcatctta

SEQ ID NO: 10412 - DNA, 20 bp, synthetic construct
  source 1..20: mol_type = other DNA
tacttgttccgtagctcatt

SEQ ID NO: 10413 - DNA, 20 bp, synthetic construct
  source 1..20: mol_type = other DNA
atgcttataagcattagcaa

SEQ ID NO: 10414 - DNA, 20 bp, synthetic construct
  source 1..20: mol_type = other DNA
aaatcagcccgtagaatgct

SEQ ID NO: 10415 - DNA, 20 bp, synthetic construct
  source 1..20: mol_type = other DNA
tcagatacatcctcacccat

SEQ ID NO: 10416 - DNA, 20 bp, synthetic construct
  source 1..20: mol_type = other DNA
tcaacatcctcgatgctaaa

SEQ ID NO: 10417 - DNA, 20 bp, synthetic construct
  source 1..20: mol_type = other DNA
gtaggccgagatgtcatcca

SEQ ID NO: 10418 - DNA, 20 bp, synthetic construct
  source 1..20: mol_type = other DNA
tatagagtaaagcaaggcgc

SEQ ID NO: 10419 - DNA, 20 bp, synthetic construct
  source 1..20: mol_type = other DNA
tggcaggatctgttacccgt

SEQ ID NO: 10420 - DNA, 20 bp, synthetic construct
  source 1..20: mol_type = other DNA
gagtcgaccgccatgagcct

SEQ ID NO: 10421 - DNA, 20 bp, synthetic construct
  source 1..20: mol_type = other DNA
gagccttggatcatccattg

SEQ ID NO: 10422 - DNA, 20 bp, synthetic construct
  source 1..20: mol_type = other DNA
cttggatcatccattgaggt

SEQ ID NO: 10423 - DNA, 20 bp, synthetic construct
  source 1..20: mol_type = other DNA
tcatccattgaggtaggtgg

SEQ ID NO: 10424 - DNA, 20 bp, synthetic construct
  source 1..20: mol_type = other DNA
tcgaaggtccatggctcctg

SEQ ID NO: 10425 - DNA, 20 bp, synthetic construct
  source 1..20: mol_type = other DNA
ccacctcatgttgtagcacg

SEQ ID NO: 10426 - DNA, 20 bp, synthetic construct
  source 1..20: mol_type = other DNA
gtagatcggcaagcgcataa

SEQ ID NO: 10427 - DNA, 20 bp, synthetic construct
  source 1..20: mol_type = other DNA
gcgtgttacttcaatctcgg

SEQ ID NO: 10428 - DNA, 20 bp, synthetic construct
  source 1..20: mol_type = other DNA
gacggccttgtaaacgtaaa

SEQ ID NO: 10429 - DNA, 20 bp, synthetic construct
  source 1..20: mol_type = other DNA
acgtaaatggtccacttatg

SEQ ID NO: 10430 - DNA, 20 bp, synthetic construct
  source 1..20: mol_type = other DNA
actcaaacagccgagtccgt

SEQ ID NO: 10431 - DNA, 20 bp, synthetic construct
  source 1..20: mol_type = other DNA
tggtcggctcttcctgtgtt

SEQ ID NO: 10432 - DNA, 20 bp, synthetic construct
  source 1..20: mol_type = other DNA
gaaataattcataggctcta

SEQ ID NO: 10433 - DNA, 20 bp, synthetic construct
  source 1..20: mol_type = other DNA
ttgcgataatagctcggccg

SEQ ID NO: 10434 - DNA, 20 bp, synthetic construct
  source 1..20: mol_type = other DNA
aaactcatattcagcctcct

SEQ ID NO: 10435 - DNA, 20 bp, synthetic construct
  source 1..20: mol_type = other DNA
aactcatattcagcctcctt

SEQ ID NO: 10436 - DNA, 20 bp, synthetic construct
  source 1..20: mol_type = other DNA
tcagcctccttgggagtccg

SEQ ID NO: 10437 - DNA, 20 bp, synthetic construct
  source 1..20: mol_type = other DNA
tagggatgctgccgtcaata

SEQ ID NO: 10438 - DNA, 20 bp, synthetic construct
  source 1..20: mol_type = other DNA
gccgtcaatacgggccacag

SEQ ID NO: 10439 - DNA, 20 bp, synthetic construct
  source 1..20: mol_type = other DNA
agtggcagcataatcataca

SEQ ID NO: 10440 - DNA, 20 bp, synthetic construct
  source 1..20: mol_type = other DNA
gtggcagcataatcatacat

SEQ ID NO: 10441 - DNA, 20 bp, synthetic construct
  source 1..20: mol_type = other DNA
acagcatacagctgcgttaa

SEQ ID NO: 10442 - DNA, 20 bp, synthetic construct
  source 1..20: mol_type = other DNA
cgatgctatacacgagcggc

SEQ ID NO: 10443 - DNA, 20 bp, synthetic construct
  source 1..20: mol_type = other DNA
tccaaagtggataaacgtgc

SEQ ID NO: 10444 - DNA, 20 bp, synthetic construct
  source 1..20: mol_type = other DNA
gataaacgtgcaggccttca

SEQ ID NO: 10445 - DNA, 20 bp, synthetic construct
  source 1..20: mol_type = other DNA
cttggttcgcatggtgtcgt

SEQ ID NO: 10446 - DNA, 20 bp, synthetic construct
  source 1..20: mol_type = other DNA
gctgtataagcatgtccaca

SEQ ID NO: 10447 - DNA, 20 bp, synthetic construct
  source 1..20: mol_type = other DNA
tctatataggtcataaagca

SEQ ID NO: 10448 - DNA, 20 bp, synthetic construct
  source 1..20: mol_type = other DNA
acttataaagttcgatatac

SEQ ID NO: 10449 - DNA, 20 bp, synthetic construct
  source 1..20: mol_type = other DNA
cgatatactggtgcgtaaac

SEQ ID NO: 10450 - DNA, 20 bp, synthetic construct
  source 1..20: mol_type = other DNA
attggtcaaattggctcctg

SEQ ID NO: 10451 - DNA, 20 bp, synthetic construct
  source 1..20: mol_type = other DNA
tcctgaggcgacgtagccca

SEQ ID NO: 10452 - DNA, 20 bp, synthetic construct
  source 1..20: mol_type = other DNA
gccatacgcataaagcactg

SEQ ID NO: 10453 - DNA, 20 bp, synthetic construct
  source 1..20: mol_type = other DNA
catacgcataaagcactgcg

SEQ ID NO: 10454 - DNA, 20 bp, synthetic construct
  source 1..20: mol_type = other DNA
gggcttctgcgggaacggcc

SEQ ID NO: 10455 - DNA, 20 bp, synthetic construct
  source 1..20: mol_type = other DNA
tactagcagttgacgtatgt

SEQ ID NO: 10456 - DNA, 20 bp, synthetic construct
  source 1..20: mol_type = other DNA
ttgacgtatgtaggcctcca

SEQ ID NO: 10457 - DNA, 20 bp, synthetic construct
  source 1..20: mol_type = other DNA
tgacgtatgtaggcctccat

SEQ ID NO: 10458 - DNA, 20 bp, synthetic construct
  source 1..20: mol_type = other DNA
ttgactgctcggcgcgaaca

SEQ ID NO: 10459 - DNA, 20 bp, synthetic construct
  source 1..20: mol_type = other DNA
gcgataagatatctgtgcca

SEQ ID NO: 10460 - DNA, 20 bp, synthetic construct
  source 1..20: mol_type = other DNA
ataagatatctgtgccacgg

SEQ ID NO: 10461 - DNA, 20 bp, synthetic construct
  source 1..20: mol_type = other DNA
aacaaccatgtgcaacggac

SEQ ID NO: 10462 - DNA, 20 bp, synthetic construct
  source 1..20: mol_type = other DNA
tggtgcctagcaagtaccca

SEQ ID NO: 10463 - DNA, 20 bp, synthetic construct
  source 1..20: mol_type = other DNA
atgatgtgagtaactactgt

SEQ ID NO: 10464 - DNA, 20 bp, synthetic construct
  source 1..20: mol_type = other DNA
cccgattactgctatacgat

SEQ ID NO: 10465 - DNA, 20 bp, synthetic construct
  source 1..20: mol_type = other DNA
actgctatacgattggaatt

SEQ ID NO: 10466 - DNA, 20 bp, synthetic construct
  source 1..20: mol_type = other DNA
acggtatatccagaatacta

SEQ ID NO: 10467 - DNA, 20 bp, synthetic construct
  source 1..20: mol_type = other DNA
ccagaatactacggctatat

SEQ ID NO: 10468 - DNA, 20 bp, synthetic construct
  source 1..20: mol_type = other DNA
tacggctatataggcattcc

SEQ ID NO: 10469 - DNA, 20 bp, synthetic construct
  source 1..20: mol_type = other DNA
ttaaatacgggacgcatgtg

SEQ ID NO: 10470 - DNA, 20 bp, synthetic construct
  source 1..20: mol_type = other DNA
aagcgaaaggacatgtaacg

SEQ ID NO: 10471 - DNA, 20 bp, synthetic construct
  source 1..20: mol_type = other DNA
accctcactgctgcgctatt

SEQ ID NO: 10472 - DNA, 20 bp, synthetic construct
  source 1..20: mol_type = other DNA
ggctatcctatgcagcagtc

SEQ ID NO: 10473 - DNA, 20 bp, synthetic construct
  source 1..20: mol_type = other DNA
tatgcagcagtcaggttata

SEQ ID NO: 10474 - DNA, 20 bp, synthetic construct
  source 1..20: mol_type = other DNA
ttactggaaccgtgatagcg

SEQ ID NO: 10475 - DNA, 20 bp, synthetic construct
  source 1..20: mol_type = other DNA
aatcacacgatggcgaatac

SEQ ID NO: 10476 - DNA, 20 bp, synthetic construct
  source 1..20: mol_type = other DNA
ttggtaccaacccttcatag

SEQ ID NO: 10477 - DNA, 20 bp, synthetic construct
  source 1..20: mol_type = other DNA
agaggcttataatgccatag

SEQ ID NO: 10478 - DNA, 20 bp, synthetic construct
  source 1..20: mol_type = other DNA
ggcttataatgccatagagg

SEQ ID NO: 10479 - DNA, 20 bp, synthetic construct
  source 1..20: mol_type = other DNA
taatgccatagaggcggccc

SEQ ID NO: 10480 - DNA, 20 bp, synthetic construct
  source 1..20: mol_type = other DNA
cattatcctgaacctcattg

SEQ ID NO: 10481 - DNA, 20 bp, synthetic construct
  source 1..20: mol_type = other DNA
ttccgactatattattgtga

SEQ ID NO: 10482 - DNA, 20 bp, synthetic construct
  source 1..20: mol_type = other DNA
aagcccataaggacttacta

SEQ ID NO: 10483 - DNA, 20 bp, synthetic construct
  source 1..20: mol_type = other DNA
tgttccgacttagtcatcaa

SEQ ID NO: 10484 - DNA, 20 bp, synthetic construct
  source 1..20: mol_type = other DNA
gttccgacttagtcatcaat

SEQ ID NO: 10485 - DNA, 20 bp, synthetic construct
  source 1..20: mol_type = other DNA
atgattaccacagagtacgt

SEQ ID NO: 10486 - DNA, 20 bp, synthetic construct
  source 1..20: mol_type = other DNA
tacgtgttcaagcacataga

SEQ ID NO: 10487 - DNA, 20 bp, synthetic construct
  source 1..20: mol_type = other DNA
acgtgttcaagcacatagat

SEQ ID NO: 10488 - DNA, 20 bp, synthetic construct
  source 1..20: mol_type = other DNA
ttcaagcacatagatgggtt

SEQ ID NO: 10489 - DNA, 20 bp, synthetic construct
  source 1..20: mol_type = other DNA
attaagcttgagcggcagta

SEQ ID NO: 10490 - DNA, 20 bp, synthetic construct
  source 1..20: mol_type = other DNA
agaaatcttgacgcacgccg

SEQ ID NO: 10491 - DNA, 20 bp, synthetic construct
  source 1..20: mol_type = other DNA
gaaatcttgacgcacgccga

SEQ ID NO: 10492 - DNA, 20 bp, synthetic construct
  source 1..20: mol_type = other DNA
agctgcggcgaaagcgttca

SEQ ID NO: 10493 - DNA, 20 bp, synthetic construct
  source 1..20: mol_type = other DNA
gctgcggcgaaagcgttcaa

SEQ ID NO: 10494 - DNA, 20 bp, synthetic construct
  source 1..20: mol_type = other DNA
ctgcggcgaaagcgttcaag

SEQ ID NO: 10495 - DNA, 20 bp, synthetic construct
  source 1..20: mol_type = other DNA
tctagcaaggtgtaccacac

SEQ ID NO: 10496 - DNA, 20 bp, synthetic construct
  source 1..20: mol_type = other DNA
ctagcaaggtgtaccacacc

SEQ ID NO: 10497 - DNA, 20 bp, synthetic construct
  source 1..20: mol_type = other DNA
attatattggtgtgccgctg

SEQ ID NO: 10498 - DNA, 20 bp, synthetic construct
  source 1..20: mol_type = other DNA
ggcgggccagctctcaaatg

SEQ ID NO: 10499 - DNA, 20 bp, synthetic construct
  source 1..20: mol_type = other DNA
tcaaatgaggtgtgaatgta

SEQ ID NO: 10500 - DNA, 20 bp, synthetic construct
  source 1..20: mol_type = other DNA
ggctgtagcctaacagttca

SEQ ID NO: 10501 - DNA, 20 bp, synthetic construct
  source 1..20: mol_type = other DNA
aaacttagtgtcctgtagtt

SEQ ID NO: 10502 - DNA, 20 bp, synthetic construct
  source 1..20: mol_type = other DNA
atcgcgaactacatcgcaga

SEQ ID NO: 10503 - DNA, 20 bp, synthetic construct
  source 1..20: mol_type = other DNA
tgcccggataataattataa

SEQ ID NO: 10504 - DNA, 20 bp, synthetic construct
  source 1..20: mol_type = other DNA
taagggagtgttgaaacgtc

SEQ ID NO: 10505 - DNA, 20 bp, synthetic construct
  source 1..20: mol_type = other DNA
aagggagtgttgaaacgtct

SEQ ID NO: 10506 - DNA, 20 bp, synthetic construct
  source 1..20: mol_type = other DNA
actgttgtacgtcgttagcc

SEQ ID NO: 10507 - DNA, 20 bp, synthetic construct
  source 1..20: mol_type = other DNA
ctgttgtacgtcgttagcca

SEQ ID NO: 10508 - DNA, 20 bp, synthetic construct
  source 1..20: mol_type = other DNA
gattctatatgccgggctaa

SEQ ID NO: 10509 - DNA, 20 bp, synthetic construct
  source 1..20: mol_type = other DNA
acgcgcgttgttaatacaaa

SEQ ID NO: 10510 - DNA, 20 bp, synthetic construct
  source 1..20: mol_type = other DNA
tgtcgttcgtcttgaatata

SEQ ID NO: 10511 - DNA, 20 bp, synthetic construct
  source 1..20: mol_type = other DNA
gtcgttcgtcttgaatatag

SEQ ID NO: 10512 - DNA, 20 bp, synthetic construct
  source 1..20: mol_type = other DNA
tcgttcgtcttgaatatagg

SEQ ID NO: 10513 - DNA, 20 bp, synthetic construct
  source 1..20: mol_type = other DNA
agggctcacatatctcagtc

SEQ ID NO: 10514 - DNA, 20 bp, synthetic construct
  source 1..20: mol_type = other DNA
cacatatctcagtcaggtga

SEQ ID NO: 10515 - DNA, 20 bp, synthetic construct
  source 1..20: mol_type = other DNA
gtacgtcgctaacaccagcg

SEQ ID NO: 10516 - DNA, 20 bp, synthetic construct
  source 1..20: mol_type = other DNA
tacgtcgctaacaccagcgc

SEQ ID NO: 10517 - DNA, 20 bp, synthetic construct
  source 1..20: mol_type = other DNA
cgctaacaccagcgcgggat

SEQ ID NO: 10518 - DNA, 20 bp, synthetic construct
  source 1..20: mol_type = other DNA
caccagcgcgggataggctt

SEQ ID NO: 10519 - DNA, 20 bp, synthetic construct
  source 1..20: mol_type = other DNA
tggtaggagtaagatggttg

SEQ ID NO: 10520 - DNA, 20 bp, synthetic construct
  source 1..20: mol_type = other DNA
gtatgccgcaaagccgtgta

SEQ ID NO: 10521 - DNA, 20 bp, synthetic construct
  source 1..20: mol_type = other DNA
tatcgacttcacaggaacaa

SEQ ID NO: 10522 - DNA, 20 bp, synthetic construct
  source 1..20: mol_type = other DNA
atcgacttcacaggaacaac

SEQ ID NO: 10523 - DNA, 20 bp, synthetic construct
  source 1..20: mol_type = other DNA
tcacaggaacaacgggaatg

SEQ ID NO: 10524 - DNA, 20 bp, synthetic construct
  source 1..20: mol_type = other DNA
ctaggtgtagcccggcccgc

SEQ ID NO: 10525 - DNA, 20 bp, synthetic construct
  source 1..20: mol_type = other DNA
tagcccggcccgctggtaat

SEQ ID NO: 10526 - DNA, 20 bp, synthetic construct
  source 1..20: mol_type = other DNA
agcccggcccgctggtaatc

SEQ ID NO: 10527 - DNA, 20 bp, synthetic construct
  source 1..20: mol_type = other DNA
gcccggcccgctggtaatcg

SEQ ID NO: 10528 - DNA, 20 bp, synthetic construct
  source 1..20: mol_type = other DNA
aaagtccgtgcgcacccgca

SEQ ID NO: 10529 - DNA, 20 bp, synthetic construct
  source 1..20: mol_type = other DNA
gcacccgcatggtctgcaca

SEQ ID NO: 10530 - DNA, 20 bp, synthetic construct
  source 1..20: mol_type = other DNA
gttcgtaggcatcctcaacg

SEQ ID NO: 10531 - DNA, 20 bp, synthetic construct
  source 1..20: mol_type = other DNA
gtaggcatcctcaacgtggt

SEQ ID NO: 10532 - DNA, 20 bp, synthetic construct
  source 1..20: mol_type = other DNA
ggcatcctcaacgtggttgg

SEQ ID NO: 10533 - DNA, 20 bp, synthetic construct
  source 1..20: mol_type = other DNA
cgaagagtgcggtcagctga

SEQ ID NO: 10534 - DNA, 20 bp, synthetic construct
  source 1..20: mol_type = other DNA
agtgcggtcagctgaaggac

SEQ ID NO: 10535 - DNA, 20 bp, synthetic construct
  source 1..20: mol_type = other DNA
atattctcgtctaaagatcg

SEQ ID NO: 10536 - DNA, 20 bp, synthetic construct
  source 1..20: mol_type = other DNA
tattctcgtctaaagatcgt

SEQ ID NO: 10537 - DNA, 20 bp, synthetic construct
  source 1..20: mol_type = other DNA
ctcctatcaccagcgcgatt

SEQ ID NO: 10538 - DNA, 20 bp, synthetic construct
  source 1..20: mol_type = other DNA
aactgctcacagttataacc

SEQ ID NO: 10539 - DNA, 20 bp, synthetic construct
  source 1..20: mol_type = other DNA
attaaacattgcttgtacgg

SEQ ID NO: 10540 - DNA, 20 bp, synthetic construct
  source 1..20: mol_type = other DNA
gtacggtggcagacgccgcg

SEQ ID NO: 10541 - DNA, 20 bp, synthetic construct
  source 1..20: mol_type = other DNA
tacgcggatgagaagaacat

SEQ ID NO: 10542 - DNA, 20 bp, synthetic construct
  source 1..20: mol_type = other DNA
acatcggcgtcgatcttaac

SEQ ID NO: 10543 - DNA, 20 bp, synthetic construct
  source 1..20: mol_type = other DNA
tcggcgtcgatcttaacagg

SEQ ID NO: 10544 - DNA, 20 bp, synthetic construct
  source 1..20: mol_type = other DNA
atgcagcgcatgacgagcag

SEQ ID NO: 10545 - DNA, 20 bp, synthetic construct
  source 1..20: mol_type = other DNA
tgccaactgttgcgctctaa

SEQ ID NO: 10546 - DNA, 20 bp, synthetic construct
  source 1..20: mol_type = other DNA
gaccaaccttgtggcctcaa

SEQ ID NO: 10547 - DNA, 20 bp, synthetic construct
  source 1..20: mol_type = other DNA
ggaggtaatgcgctcgttat

SEQ ID NO: 10548 - DNA, 20 bp, synthetic construct
  source 1..20: mol_type = other DNA
gaggtaatgcgctcgttatc

SEQ ID NO: 10549 - DNA, 20 bp, synthetic construct
  source 1..20: mol_type = other DNA
ctgcacaaagccctcgcaga

SEQ ID NO: 10550 - DNA, 20 bp, synthetic construct
  source 1..20: mol_type = other DNA
acaaagccctcgcagatgga

SEQ ID NO: 10551 - DNA, 20 bp, synthetic construct
  source 1..20: mol_type = other DNA
cacgatctcgtccttgtcct

SEQ ID NO: 10552 - DNA, 20 bp, synthetic construct
  source 1..20: mol_type = other DNA
cacagagggcgtattgcgta

SEQ ID NO: 10553 - DNA, 20 bp, synthetic construct
  source 1..20: mol_type = other DNA
atggattctacgaataagcc

SEQ ID NO: 10554 - DNA, 20 bp, synthetic construct
  source 1..20: mol_type = other DNA
tcagcgcaaatatctcgccg

SEQ ID NO: 10555 - DNA, 20 bp, synthetic construct
  source 1..20: mol_type = other DNA
ttgagccttacgaatgaaca

SEQ ID NO: 10556 - DNA, 20 bp, synthetic construct
  source 1..20: mol_type = other DNA
atgaacaaggaagccttgta

SEQ ID NO: 10557 - DNA, 20 bp, synthetic construct
  source 1..20: mol_type = other DNA
tgtaaggcctgtctattgcg

SEQ ID NO: 10558 - DNA, 20 bp, synthetic construct
  source 1..20: mol_type = other DNA
ggcagacattgccgctgaga

SEQ ID NO: 10559 - DNA, 20 bp, synthetic construct
  source 1..20: mol_type = other DNA
tgctacatgatcccgaagct

SEQ ID NO: 10560 - DNA, 20 bp, synthetic construct
  source 1..20: mol_type = other DNA
gcttcctccagagtattatg

SEQ ID NO: 10561 - DNA, 20 bp, synthetic construct
  source 1..20: mol_type = other DNA
gagcaacgtcgtattcgcct

SEQ ID NO: 10562 - DNA, 20 bp, synthetic construct
  source 1..20: mol_type = other DNA
ccaatacatccgccaactat

SEQ ID NO: 10563 - DNA, 20 bp, synthetic construct
  source 1..20: mol_type = other DNA
caagcggtccattatgtatt

SEQ ID NO: 10564 - DNA, 20 bp, synthetic construct
  source 1..20: mol_type = other DNA
gtggtggacgtggactcaaa

SEQ ID NO: 10565 - DNA, 20 bp, synthetic construct
  source 1..20: mol_type = other DNA
actcaaacgggaagtacgtt

SEQ ID NO: 10566 - DNA, 20 bp, synthetic construct
  source 1..20: mol_type = other DNA
accgggccagccaatgaatc

SEQ ID NO: 10567 - DNA, 20 bp, synthetic construct
  source 1..20: mol_type = other DNA
gtggcgcaaagaggtaaacc

SEQ ID NO: 10568 - DNA, 20 bp, synthetic construct
  source 1..20: mol_type = other DNA
tctaatgcgacttgtggcca

SEQ ID NO: 10569 - DNA, 20 bp, synthetic construct
  source 1..20: mol_type = other DNA
cgacttgtggccatggtatt

SEQ ID NO: 10570 - DNA, 20 bp, synthetic construct
  source 1..20: mol_type = other DNA
gcgaggttctaaatacgtcg

SEQ ID NO: 10571 - DNA, 20 bp, synthetic construct
  source 1..20: mol_type = other DNA
tctaaatacgtcgcggctga

SEQ ID NO: 10572 - DNA, 20 bp, synthetic construct
  source 1..20: mol_type = other DNA
tacgtcgcggctgaaggaaa

SEQ ID NO: 10573 - DNA, 20 bp, synthetic construct
  source 1..20: mol_type = other DNA
taacttcatcattgacacga

SEQ ID NO: 10574 - DNA, 20 bp, synthetic construct
  source 1..20: mol_type = other DNA
atcattgacacgacggacca

SEQ ID NO: 10575 - DNA, 20 bp, synthetic construct
  source 1..20: mol_type = other DNA
acacgacggaccacggcaca

SEQ ID NO: 10576 - DNA, 20 bp, synthetic construct
  source 1..20: mol_type = other DNA
acggcacatggagaagactg

SEQ ID NO: 10577 - DNA, 20 bp, synthetic construct
  source 1..20: mol_type = other DNA
actgcggcattatcgttcaa

SEQ ID NO: 10578 - DNA, 20 bp, synthetic construct
  source 1..20: mol_type = other DNA
tcccaccattgagagcgaaa

SEQ ID NO: 10579 - DNA, 20 bp, synthetic construct
  source 1..20: mol_type = other DNA
caccattgagagcgaaacgg

SEQ ID NO: 10580 - DNA, 20 bp, synthetic construct
  source 1..20: mol_type = other DNA
agtcacaagatacgctacat

SEQ ID NO: 10581 - DNA, 20 bp, synthetic construct
  source 1..20: mol_type = other DNA
aagagtcgtggagtcgccct

SEQ ID NO: 10582 - DNA, 20 bp, synthetic construct
  source 1..20: mol_type = other DNA
aactgtgtacaacctatccg

SEQ ID NO: 10583 - DNA, 20 bp, synthetic construct
  source 1..20: mol_type = other DNA
tcgtgacggcctacgcggaa

SEQ ID NO: 10584 - DNA, 20 bp, synthetic construct
  source 1..20: mol_type = other DNA
tattgcccttgagctatccc

SEQ ID NO: 10585 - DNA, 20 bp, synthetic construct
  source 1..20: mol_type = other DNA
cagcccggcgaatcctacat

SEQ ID NO: 10586 - DNA, 20 bp, synthetic construct
  source 1..20: mol_type = other DNA
agcccggcgaatcctacatt

SEQ ID NO: 10587 - DNA, 20 bp, synthetic construct
  source 1..20: mol_type = other DNA
gcccggcgaatcctacattg

SEQ ID NO: 10588 - DNA, 20 bp, synthetic construct
  source 1..20: mol_type = other DNA
atgaacagttcgtgctccga

SEQ ID NO: 10589 - DNA, 20 bp, synthetic construct
  source 1..20: mol_type = other DNA
ccatgtctctacgaatagta

SEQ ID NO: 10590 - DNA, 20 bp, synthetic construct
  source 1..20: mol_type = other DNA
gtaagatgatgcgccgccat

SEQ ID NO: 10591 - DNA, 20 bp, synthetic construct
  source 1..20: mol_type = other DNA
atgctggacatcgtccatat

SEQ ID NO: 10592 - DNA, 20 bp, synthetic construct
  source 1..20: mol_type = other DNA
tcgaggacggacacaaagct

SEQ ID NO: 10593 - DNA, 20 bp, synthetic construct
  source 1..20: mol_type = other DNA
acgggagatagcataatcct

SEQ ID NO: 10594 - DNA, 20 bp, synthetic construct
  source 1..20: mol_type = other DNA
ctaggcgttacaatgcacga

SEQ ID NO: 10595 - DNA, 20 bp, synthetic construct
  source 1..20: mol_type = other DNA
tgtcgtagcagaaacaatta

SEQ ID NO: 10596 - DNA, 20 bp, synthetic construct
  source 1..20: mol_type = other DNA
attattgataaagtatacga

SEQ ID NO: 10597 - DNA, 20 bp, synthetic construct
  source 1..20: mol_type = other DNA
taaagtatacgatggcatgt

SEQ ID NO: 10598 - DNA, 20 bp, synthetic construct
  source 1..20: mol_type = other DNA
gatcatctgccaatagaaga

SEQ ID NO: 10599 - DNA, 20 bp, synthetic construct
  source 1..20: mol_type = other DNA
ccgcaacagacacgacggct

SEQ ID NO: 10600 - DNA, 20 bp, synthetic construct
  source 1..20: mol_type = other DNA
tgccacaatggctcgctcaa

SEQ ID NO: 10601 - DNA, 20 bp, synthetic construct
  source 1..20: mol_type = other DNA
ggctgatgccagcgcatccg

SEQ ID NO: 10602 - DNA, 20 bp, synthetic construct
  source 1..20: mol_type = other DNA
gctgatgccagcgcatccgt

SEQ ID NO: 10603 - DNA, 20 bp, synthetic construct
  source 1..20: mol_type = other DNA
ctgatgccagcgcatccgtg

SEQ ID NO: 10604 - DNA, 20 bp, synthetic construct
  source 1..20: mol_type = other DNA
tgatgccagcgcatccgtgg

SEQ ID NO: 10605 - DNA, 20 bp, synthetic construct
  source 1..20: mol_type = other DNA
gatgccagcgcatccgtggg

SEQ ID NO: 10606 - DNA, 20 bp, synthetic construct
  source 1..20: mol_type = other DNA
atgagccctcccgcccattc

SEQ ID NO: 10607 - DNA, 20 bp, synthetic construct
  source 1..20: mol_type = other DNA
tgagccctcccgcccattca

SEQ ID NO: 10608 - DNA, 20 bp, synthetic construct
  source 1..20: mol_type = other DNA
tcccgcccattcagggtagt

SEQ ID NO: 10609 - DNA, 20 bp, synthetic construct
  source 1..20: mol_type = other DNA
gcaatcgcctcactatcgat

SEQ ID NO: 10610 - DNA, 20 bp, synthetic construct
  source 1..20: mol_type = other DNA
ggtgttatacagcggccagt

SEQ ID NO: 10611 - DNA, 20 bp, synthetic construct
  source 1..20: mol_type = other DNA
atgggtatcaatggtggcgg

SEQ ID NO: 10612 - DNA, 20 bp, synthetic construct
  source 1..20: mol_type = other DNA
tgagcataaggtcgatgcct

SEQ ID NO: 10613 - DNA, 20 bp, synthetic construct
  source 1..20: mol_type = other DNA
gagcataaggtcgatgccta

SEQ ID NO: 10614 - DNA, 20 bp, synthetic construct
  source 1..20: mol_type = other DNA
cgatgcctagggctcgctca

SEQ ID NO: 10615 - DNA, 20 bp, synthetic construct
  source 1..20: mol_type = other DNA
ggcctcatctataatcataa

SEQ ID NO: 10616 - DNA, 20 bp, synthetic construct
  source 1..20: mol_type = other DNA
tataatcataaaggcatagc

SEQ ID NO: 10617 - DNA, 20 bp, synthetic construct
  source 1..20: mol_type = other DNA
ggttgaggcgccgatgtctt

SEQ ID NO: 10618 - DNA, 20 bp, synthetic construct
  source 1..20: mol_type = other DNA
tggcgagggtcactgcggtt

SEQ ID NO: 10619 - DNA, 20 bp, synthetic construct
  source 1..20: mol_type = other DNA
gtcactgcggttaggactct

SEQ ID NO: 10620 - DNA, 20 bp, synthetic construct
  source 1..20: mol_type = other DNA
ctgcggttaggactcttggc

SEQ ID NO: 10621 - DNA, 20 bp, synthetic construct
  source 1..20: mol_type = other DNA
tgcggttaggactcttggct

SEQ ID NO: 10622 - DNA, 20 bp, synthetic construct
  source 1..20: mol_type = other DNA
ttctgaacacgtgtacgggc

SEQ ID NO: 10623 - DNA, 20 bp, synthetic construct
  source 1..20: mol_type = other DNA
tctgaacacgtgtacgggca

SEQ ID NO: 10624 - DNA, 20 bp, synthetic construct
  source 1..20: mol_type = other DNA
cacgtgtacgggcagggccg

SEQ ID NO: 10625 - DNA, 20 bp, synthetic construct
  source 1..20: mol_type = other DNA
aatgagcacccggtctgcga

SEQ ID NO: 10626 - DNA, 20 bp, synthetic construct
  source 1..20: mol_type = other DNA
gagcacccggtctgcgaggg

SEQ ID NO: 10627 - DNA, 20 bp, synthetic construct
  source 1..20: mol_type = other DNA
gtctgcgagggaggttggaa

SEQ ID NO: 10628 - DNA, 20 bp, synthetic construct
  source 1..20: mol_type = other DNA
acatcattcttgtgctcagc

SEQ ID NO: 10629 - DNA, 20 bp, synthetic construct
  source 1..20: mol_type = other DNA
tgaccaggctccaataaagt

SEQ ID NO: 10630 - DNA, 20 bp, synthetic construct
  source 1..20: mol_type = other DNA
tacgttgttatggaacgcga

SEQ ID NO: 10631 - DNA, 20 bp, synthetic construct
  source 1..20: mol_type = other DNA
cgataaagttcagtatccat

SEQ ID NO: 10632 - DNA, 20 bp, synthetic construct
  source 1..20: mol_type = other DNA
aaagttcagtatccattgga

SEQ ID NO: 10633 - DNA, 20 bp, synthetic construct
  source 1..20: mol_type = other DNA
aatgtcatccgctaactgaa

SEQ ID NO: 10634 - DNA, 20 bp, synthetic construct
  source 1..20: mol_type = other DNA
tacacagcagcgctcccagt

SEQ ID NO: 10635 - DNA, 20 bp, synthetic construct
  source 1..20: mol_type = other DNA
gcgccttggctacgccaaag

SEQ ID NO: 10636 - DNA, 20 bp, synthetic construct
  source 1..20: mol_type = other DNA
cgccttggctacgccaaagc

SEQ ID NO: 10637 - DNA, 20 bp, synthetic construct
  source 1..20: mol_type = other DNA
cttcacatcgttgtcaaagg

SEQ ID NO: 10638 - DNA, 20 bp, synthetic construct
  source 1..20: mol_type = other DNA
ttcacatcgttgtcaaagga

SEQ ID NO: 10639 - DNA, 20 bp, synthetic construct
  source 1..20: mol_type = other DNA
cgtgaaagtactccactgct

SEQ ID NO: 10640 - DNA, 20 bp, synthetic construct
  source 1..20: mol_type = other DNA
cgcactggttaacggtactg

SEQ ID NO: 10641 - DNA, 20 bp, synthetic construct
  source 1..20: mol_type = other DNA
actggttaacggtactgagg

SEQ ID NO: 10642 - DNA, 20 bp, synthetic construct
  source 1..20: mol_type = other DNA
cggtatagggcttgagtagt

SEQ ID NO: 10643 - DNA, 20 bp, synthetic construct
  source 1..20: mol_type = other DNA
agttggcaatactcttaaac

SEQ ID NO: 10644 - DNA, 20 bp, synthetic construct
  source 1..20: mol_type = other DNA
ttggcaatactcttaaaccg

SEQ ID NO: 10645 - DNA, 20 bp, synthetic construct
  source 1..20: mol_type = other DNA
tgagtaccggtatgtcttct

SEQ ID NO: 10646 - DNA, 20 bp, synthetic construct
  source 1..20: mol_type = other DNA
tctgccgtgttgcgaatctt

SEQ ID NO: 10647 - DNA, 20 bp, synthetic construct
  source 1..20: mol_type = other DNA
aagcatcggcacgcccgtgt

SEQ ID NO: 10648 - DNA, 20 bp, synthetic construct
  source 1..20: mol_type = other DNA
cggcacgcccgtgtaggtac

SEQ ID NO: 10649 - DNA, 20 bp, synthetic construct
  source 1..20: mol_type = other DNA
cacgcccgtgtaggtactgg

SEQ ID NO: 10650 - DNA, 20 bp, synthetic construct
  source 1..20: mol_type = other DNA
gaatatatccgttatagtgc

SEQ ID NO: 10651 - DNA, 20 bp, synthetic construct
  source 1..20: mol_type = other DNA
tatccgttatagtgctggcc

SEQ ID NO: 10652 - DNA, 20 bp, synthetic construct
  source 1..20: mol_type = other DNA
ggcccggcatctgatcgcca

SEQ ID NO: 10653 - DNA, 20 bp, synthetic construct
  source 1..20: mol_type = other DNA
tgctcgctgaacctcgtaga

SEQ ID NO: 10654 - DNA, 20 bp, synthetic construct
  source 1..20: mol_type = other DNA
gaacaacattgcgcctaatt

SEQ ID NO: 10655 - DNA, 20 bp, synthetic construct
  source 1..20: mol_type = other DNA
tcagaataccggttatgacg

SEQ ID NO: 10656 - DNA, 20 bp, synthetic construct
  source 1..20: mol_type = other DNA
aggtggatctgacctataat

SEQ ID NO: 10657 - DNA, 20 bp, synthetic construct
  source 1..20: mol_type = other DNA
aggcataattacctcttgta

SEQ ID NO: 10658 - DNA, 20 bp, synthetic construct
  source 1..20: mol_type = other DNA
ggcataattacctcttgtag

SEQ ID NO: 10659 - DNA, 20 bp, synthetic construct
  source 1..20: mol_type = other DNA
tctagctcattagacacgga

SEQ ID NO: 10660 - DNA, 20 bp, synthetic construct
  source 1..20: mol_type = other DNA
ctagctcattagacacggat

SEQ ID NO: 10661 - DNA, 20 bp, synthetic construct
  source 1..20: mol_type = other DNA
tagctcattagacacggatg

SEQ ID NO: 10662 - DNA, 20 bp, synthetic construct
  source 1..20: mol_type = other DNA
tggttgaatgtcttctgctc

SEQ ID NO: 10663 - DNA, 20 bp, synthetic construct
  source 1..20: mol_type = other DNA
ggtgtatcttgattaaactc

SEQ ID NO: 10664 - DNA, 20 bp, synthetic construct
  source 1..20: mol_type = other DNA
ttagttgttgttctagatcg

SEQ ID NO: 10665 - DNA, 20 bp, synthetic construct
  source 1..20: mol_type = other DNA
gttgttctagatcgtggcac

SEQ ID NO: 10666 - DNA, 20 bp, synthetic construct
  source 1..20: mol_type = other DNA
cgtggcacaggatagttatc

SEQ ID NO: 10667 - DNA, 20 bp, synthetic construct
  source 1..20: mol_type = other DNA
cttactatagtcctcgaatg

SEQ ID NO: 10668 - DNA, 20 bp, synthetic construct
  source 1..20: mol_type = other DNA
tgtggcacgggataattgtt

SEQ ID NO: 10669 - DNA, 20 bp, synthetic construct
  source 1..20: mol_type = other DNA
aaaggagttgaacaagtcgc

SEQ ID NO: 10670 - DNA, 20 bp, synthetic construct
  source 1..20: mol_type = other DNA
atactgatattccgtaacaa

SEQ ID NO: 10671 - DNA, 20 bp, synthetic construct
  source 1..20: mol_type = other DNA
tgggaagcggcactgtacta

SEQ ID NO: 10672 - DNA, 20 bp, synthetic construct
  source 1..20: mol_type = other DNA
acgaagattggcgggtaaat

SEQ ID NO: 10673 - DNA, 20 bp, synthetic construct
  source 1..20: mol_type = other DNA
cgggtaaatcggtgtcatct

SEQ ID NO: 10674 - DNA, 20 bp, synthetic construct
  source 1..20: mol_type = other DNA
cttccctgaatgggtcgtta

SEQ ID NO: 10675 - DNA, 20 bp, synthetic construct
  source 1..20: mol_type = other DNA
tctacccgtatcgtatcatc

SEQ ID NO: 10676 - DNA, 20 bp, synthetic construct
  source 1..20: mol_type = other DNA
aatcccgctatccgtgtgaa

SEQ ID NO: 10677 - DNA, 20 bp, synthetic construct
  source 1..20: mol_type = other DNA
tgtccagttgcctaattgaa

SEQ ID NO: 10678 - DNA, 20 bp, synthetic construct
  source 1..20: mol_type = other DNA
atatcggcctgaagctcatt

SEQ ID NO: 10679 - DNA, 20 bp, synthetic construct
  source 1..20: mol_type = other DNA
atgtgtaaagggatgcgctc

SEQ ID NO: 10680 - DNA, 20 bp, synthetic construct
  source 1..20: mol_type = other DNA
gcgctcaggatctgctaaat

SEQ ID NO: 10681 - DNA, 20 bp, synthetic construct
  source 1..20: mol_type = other DNA
ggtgtattctgtgcttgcac

SEQ ID NO: 10682 - DNA, 20 bp, synthetic construct
  source 1..20: mol_type = other DNA
gcttgcacaagtgcttgcac

SEQ ID NO: 10683 - DNA, 20 bp, synthetic construct
  source 1..20: mol_type = other DNA
tatcttattagggcgcatag

SEQ ID NO: 10684 - DNA, 20 bp, synthetic construct
  source 1..20: mol_type = other DNA
caagtattgtcataccgaca

SEQ ID NO: 10685 - DNA, 20 bp, synthetic construct
  source 1..20: mol_type = other DNA
ggttgtattcaagaattgat

SEQ ID NO: 10686 - DNA, 20 bp, synthetic construct
  source 1..20: mol_type = other DNA
ttaaccctaaccgtcactat

SEQ ID NO: 10687 - DNA, 20 bp, synthetic construct
  source 1..20: mol_type = other DNA
gggaccaaacaagatccctg

SEQ ID NO: 10688 - DNA, 20 bp, synthetic construct
  source 1..20: mol_type = other DNA
ttgcgtaaacttaccggagt

SEQ ID NO: 10689 - DNA, 20 bp, synthetic construct
  source 1..20: mol_type = other DNA
tgcgtaaacttaccggagta

SEQ ID NO: 10690 - DNA, 20 bp, synthetic construct
  source 1..20: mol_type = other DNA
tgagtgggaatctatctgta

SEQ ID NO: 10691 - DNA, 20 bp, synthetic construct
  source 1..20: mol_type = other DNA
ggatacgttaatatgaccac

SEQ ID NO: 10692 - DNA, 20 bp, synthetic construct
  source 1..20: mol_type = other DNA
gatacgttaatatgaccact

SEQ ID NO: 10693 - DNA, 20 bp, synthetic construct
  source 1..20: mol_type = other DNA
cgttaatatgaccactgggt

SEQ ID NO: 10694 - DNA, 20 bp, synthetic construct
  source 1..20: mol_type = other DNA
ctgggttggtattcctcccg

SEQ ID NO: 10695 - DNA, 20 bp, synthetic construct
  source 1..20: mol_type = other DNA
aaggtaatcatcatcgcacc

SEQ ID NO: 10696 - DNA, 20 bp, synthetic construct
  source 1..20: mol_type = other DNA
catcatcgcacccggatcat

SEQ ID NO: 10697 - DNA, 20 bp, synthetic construct
  source 1..20: mol_type = other DNA
atcatcgcacccggatcatc

SEQ ID NO: 10698 - DNA, 20 bp, synthetic construct
  source 1..20: mol_type = other DNA
tcatcgcacccggatcatcg

SEQ ID NO: 10699 - DNA, 20 bp, synthetic construct
  source 1..20: mol_type = other DNA
taattgcattgcctccgtag

SEQ ID NO: 10700 - DNA, 20 bp, synthetic construct
  source 1..20: mol_type = other DNA
aatgtgatcggatacgtaac

SEQ ID NO: 10701 - DNA, 20 bp, synthetic construct
  source 1..20: mol_type = other DNA
atgtgatcggatacgtaacg

SEQ ID NO: 10702 - DNA, 20 bp, synthetic construct
  source 1..20: mol_type = other DNA
gatatagatgaacatgcgtc

SEQ ID NO: 10703 - DNA, 20 bp, synthetic construct
  source 1..20: mol_type = other DNA
cctgaaagcttatctctgcg

SEQ ID NO: 10704 - DNA, 20 bp, synthetic construct
  source 1..20: mol_type = other DNA
cttatctctgcgtggtgagt

SEQ ID NO: 10705 - DNA, 20 bp, synthetic construct
  source 1..20: mol_type = other DNA
gtccgaacttgtgccaatct

SEQ ID NO: 10706 - DNA, 20 bp, synthetic construct
  source 1..20: mol_type = other DNA
tgatcggagatgttccaggt

SEQ ID NO: 10707 - DNA, 20 bp, synthetic construct
  source 1..20: mol_type = other DNA
aaagcgtatattgcgtctac

SEQ ID NO: 10708 - DNA, 20 bp, synthetic construct
  source 1..20: mol_type = other DNA
aagcgtatattgcgtctact

SEQ ID NO: 10709 - DNA, 20 bp, synthetic construct
  source 1..20: mol_type = other DNA
agcgtatattgcgtctactg

SEQ ID NO: 10710 - DNA, 20 bp, synthetic construct
  source 1..20: mol_type = other DNA
ggtgataaagcgctcgccga

SEQ ID NO: 10711 - DNA, 20 bp, synthetic construct
  source 1..20: mol_type = other DNA
gtgataaagcgctcgccgaa

SEQ ID NO: 10712 - DNA, 20 bp, synthetic construct
  source 1..20: mol_type = other DNA
aaagcgctcgccgaagggaa

SEQ ID NO: 10713 - DNA, 20 bp, synthetic construct
  source 1..20: mol_type = other DNA
gccgaagggaatggataccg

SEQ ID NO: 10714 - DNA, 20 bp, synthetic construct
  source 1..20: mol_type = other DNA
agcttaatccagagcgcaag

SEQ ID NO: 10715 - DNA, 20 bp, synthetic construct
  source 1..20: mol_type = other DNA
ttaatccagagcgcaagagg

SEQ ID NO: 10716 - DNA, 20 bp, synthetic construct
  source 1..20: mol_type = other DNA
agatacgttgcgtccgtaat

SEQ ID NO: 10717 - DNA, 20 bp, synthetic construct
  source 1..20: mol_type = other DNA
ttccctccaccgatacctcc

SEQ ID NO: 10718 - DNA, 20 bp, synthetic construct
  source 1..20: mol_type = other DNA
catccgaactatattcgtcc

SEQ ID NO: 10719 - DNA, 20 bp, synthetic construct
  source 1..20: mol_type = other DNA
atccgaactatattcgtcca

SEQ ID NO: 10720 - DNA, 20 bp, synthetic construct
  source 1..20: mol_type = other DNA
gggatctacaagcgtgtaaa

SEQ ID NO: 10721 - DNA, 20 bp, synthetic construct
  source 1..20: mol_type = other DNA
gtgtaaacggcgccctctaa

SEQ ID NO: 10722 - DNA, 20 bp, synthetic construct
  source 1..20: mol_type = other DNA
cggcgccctctaaaggtgtt

SEQ ID NO: 10723 - DNA, 20 bp, synthetic construct
  source 1..20: mol_type = other DNA
tcccagtcatatccgttgcg

SEQ ID NO: 10724 - DNA, 20 bp, synthetic construct
  source 1..20: mol_type = other DNA
atctgggccgtgccctgaat

SEQ ID NO: 10725 - DNA, 20 bp, synthetic construct
  source 1..20: mol_type = other DNA
ctgaatcggagcatcctgcc

SEQ ID NO: 10726 - DNA, 20 bp, synthetic construct
  source 1..20: mol_type = other DNA
gacatgcacccaatatatgg

SEQ ID NO: 10727 - DNA, 20 bp, synthetic construct
  source 1..20: mol_type = other DNA
tcaaaccctactggaacata

SEQ ID NO: 10728 - DNA, 20 bp, synthetic construct
  source 1..20: mol_type = other DNA
cctgctattaagcaagtctt

SEQ ID NO: 10729 - DNA, 20 bp, synthetic construct
  source 1..20: mol_type = other DNA
gtgtggtgcgccgctgcatg

SEQ ID NO: 10730 - DNA, 20 bp, synthetic construct
  source 1..20: mol_type = other DNA
gtgcgccgctgcatgaggtg

SEQ ID NO: 10731 - DNA, 20 bp, synthetic construct
  source 1..20: mol_type = other DNA
cgctgcatgaggtgcggcca

SEQ ID NO: 10732 - DNA, 20 bp, synthetic construct
  source 1..20: mol_type = other DNA
cgcataagatgtagctacat

SEQ ID NO: 10733 - DNA, 20 bp, synthetic construct
  source 1..20: mol_type = other DNA
agatgtagctacatgggatg

SEQ ID NO: 10734 - DNA, 20 bp, synthetic construct
  source 1..20: mol_type = other DNA
atgtaaggatcgtgatgtgt

SEQ ID NO: 10735 - DNA, 20 bp, synthetic construct
  source 1..20: mol_type = other DNA
tgtaaggatcgtgatgtgtt

SEQ ID NO: 10736 - DNA, 20 bp, synthetic construct
  source 1..20: mol_type = other DNA
ttgtgcaggccggtgtagtc

SEQ ID NO: 10737 - DNA, 20 bp, synthetic construct
  source 1..20: mol_type = other DNA
tgtagtctggcctatagtta

SEQ ID NO: 10738 - DNA, 20 bp, synthetic construct
  source 1..20: mol_type = other DNA
tctggcctatagttaaggaa

SEQ ID NO: 10739 - DNA, 20 bp, synthetic construct
  source 1..20: mol_type = other DNA
tgcatagaggaatctattgt

SEQ ID NO: 10740 - DNA, 20 bp, synthetic construct
  source 1..20: mol_type = other DNA
tagtcttacgctcataatca

SEQ ID NO: 10741 - DNA, 20 bp, synthetic construct
  source 1..20: mol_type = other DNA
tggaccgtagatgattaata

SEQ ID NO: 10742 - DNA, 20 bp, synthetic construct
  source 1..20: mol_type = other DNA
accgtagatgattaataagg

SEQ ID NO: 10743 - DNA, 20 bp, synthetic construct
  source 1..20: mol_type = other DNA
gcgtagaaagagaataaccg

SEQ ID NO: 10744 - DNA, 20 bp, synthetic construct
  source 1..20: mol_type = other DNA
gtgaactactgttgcatgca

SEQ ID NO: 10745 - DNA, 20 bp, synthetic construct
  source 1..20: mol_type = other DNA
tactgttgcatgcaaggcct

SEQ ID NO: 10746 - DNA, 20 bp, synthetic construct
  source 1..20: mol_type = other DNA
tgtcagtacatacgctatcg

SEQ ID NO: 10747 - DNA, 20 bp, synthetic construct
  source 1..20: mol_type = other DNA
tgccgccgtgtaccttatcg

SEQ ID NO: 10748 - DNA, 20 bp, synthetic construct
  source 1..20: mol_type = other DNA
aagctcttcatcgaaatgat

SEQ ID NO: 10749 - DNA, 20 bp, synthetic construct
  source 1..20: mol_type = other DNA
tcttcatcgaaatgatcggt

SEQ ID NO: 10750 - DNA, 20 bp, synthetic construct
  source 1..20: mol_type = other DNA
ctcatcgtataggagggcgc

SEQ ID NO: 10751 - DNA, 20 bp, synthetic construct
  source 1..20: mol_type = other DNA
ggagggcgccggcttaatgt

SEQ ID NO: 10752 - DNA, 20 bp, synthetic construct
  source 1..20: mol_type = other DNA
gcttaatgtaggaaatccac

SEQ ID NO: 10753 - DNA, 20 bp, synthetic construct
  source 1..20: mol_type = other DNA
cttaatgtaggaaatccact

SEQ ID NO: 10754 - DNA, 20 bp, synthetic construct
  source 1..20: mol_type = other DNA
atagtgcacatcaacataag

SEQ ID NO: 10755 - DNA, 20 bp, synthetic construct
  source 1..20: mol_type = other DNA
gctagaatgggtaacccatt

SEQ ID NO: 10756 - DNA, 20 bp, synthetic construct
  source 1..20: mol_type = other DNA
ggaaacagtagtgaatacgg

SEQ ID NO: 10757 - DNA, 20 bp, synthetic construct
  source 1..20: mol_type = other DNA
gaaacagtagtgaatacgga

SEQ ID NO: 10758 - DNA, 20 bp, synthetic construct
  source 1..20: mol_type = other DNA
cagccttgcatgttcgcata

SEQ ID NO: 10759 - DNA, 20 bp, synthetic construct
  source 1..20: mol_type = other DNA
aatgttgcaaatcgccgagc

SEQ ID NO: 10760 - DNA, 20 bp, synthetic construct
  source 1..20: mol_type = other DNA
aaggcattgaactgcaactt

SEQ ID NO: 10761 - DNA, 20 bp, synthetic construct
  source 1..20: mol_type = other DNA
aagatcttatcagcgtacat

SEQ ID NO: 10762 - DNA, 20 bp, synthetic construct
  source 1..20: mol_type = other DNA
agaactataccaaagtaggt

SEQ ID NO: 10763 - DNA, 20 bp, synthetic construct
  source 1..20: mol_type = other DNA
gctaataatgtagtccacaa

SEQ ID NO: 10764 - DNA, 20 bp, synthetic construct
  source 1..20: mol_type = other DNA
gcggccgcaatataaactgt

SEQ ID NO: 10765 - DNA, 20 bp, synthetic construct
  source 1..20: mol_type = other DNA
tagggtcgaatactggcagg

SEQ ID NO: 10766 - DNA, 20 bp, synthetic construct
  source 1..20: mol_type = other DNA
tatatatattaataagaccg

SEQ ID NO: 10767 - DNA, 20 bp, synthetic construct
  source 1..20: mol_type = other DNA
attaataagaccgcggtcga

SEQ ID NO: 10768 - DNA, 20 bp, synthetic construct
  source 1..20: mol_type = other DNA
acataactcatcatacgtgt

SEQ ID NO: 10769 - DNA, 20 bp, synthetic construct
  source 1..20: mol_type = other DNA
actcatcatacgtgtaggac

SEQ ID NO: 10770 - DNA, 20 bp, synthetic construct
  source 1..20: mol_type = other DNA
tcatacgtgtaggactggag

SEQ ID NO: 10771 - DNA, 20 bp, synthetic construct
  source 1..20: mol_type = other DNA
catacgtgtaggactggagg

SEQ ID NO: 10772 - DNA, 20 bp, synthetic construct
  source 1..20: mol_type = other DNA
atacgtgtaggactggaggg

SEQ ID NO: 10773 - DNA, 20 bp, synthetic construct
  source 1..20: mol_type = other DNA
taaagcatgttccgcgtccg

SEQ ID NO: 10774 - DNA, 20 bp, synthetic construct
  source 1..20: mol_type = other DNA
gccttattctgctgaggata

SEQ ID NO: 10775 - DNA, 20 bp, synthetic construct
  source 1..20: mol_type = other DNA
gggccgcagatcaaagtcga

SEQ ID NO: 10776 - DNA, 20 bp, synthetic construct
  source 1..20: mol_type = other DNA
ggccgcagatcaaagtcgat

SEQ ID NO: 10777 - DNA, 20 bp, synthetic construct
  source 1..20: mol_type = other DNA
gggaatgtcgtcatgaatgt

SEQ ID NO: 10778 - DNA, 20 bp, synthetic construct
  source 1..20: mol_type = other DNA
acataaactcgctcatagac

SEQ ID NO: 10779 - DNA, 20 bp, synthetic construct
  source 1..20: mol_type = other DNA
ttcgtccgtgtcaaagataa

SEQ ID NO: 10780 - DNA, 20 bp, synthetic construct
  source 1..20: mol_type = other DNA
taatggctatcttcttcgat

SEQ ID NO: 10781 - DNA, 20 bp, synthetic construct
  source 1..20: mol_type = other DNA
acagtgaaggtcgtagcata

SEQ ID NO: 10782 - DNA, 20 bp, synthetic construct
  source 1..20: mol_type = other DNA
ggtcgtagcatatggcaaca

SEQ ID NO: 10783 - DNA, 20 bp, synthetic construct
  source 1..20: mol_type = other DNA
aatatagtactgcggcgtgt

SEQ ID NO: 10784 - DNA, 20 bp, synthetic construct
  source 1..20: mol_type = other DNA
agaaaggcaatccggttcac

SEQ ID NO: 10785 - DNA, 20 bp, synthetic construct
  source 1..20: mol_type = other DNA
ctacaaacgtgtgcttggtg

SEQ ID NO: 10786 - DNA, 20 bp, synthetic construct
  source 1..20: mol_type = other DNA
cttctagtaggcttagatga

SEQ ID NO: 10787 - DNA, 20 bp, synthetic construct
  source 1..20: mol_type = other DNA
aggcttagatgagggtagtc

SEQ ID NO: 10788 - DNA, 20 bp, synthetic construct
  source 1..20: mol_type = other DNA
tgcgggcagctatagtaggc

SEQ ID NO: 10789 - DNA, 20 bp, synthetic construct
  source 1..20: mol_type = other DNA
ctcggcctctgagtaaatga

SEQ ID NO: 10790 - DNA, 20 bp, synthetic construct
  source 1..20: mol_type = other DNA
tcggcctctgagtaaatgac

SEQ ID NO: 10791 - DNA, 20 bp, synthetic construct
  source 1..20: mol_type = other DNA
gagtaaatgacgggtggccg

SEQ ID NO: 10792 - DNA, 20 bp, synthetic construct
  source 1..20: mol_type = other DNA
agtaaatgacgggtggccgt

SEQ ID NO: 10793 - DNA, 20 bp, synthetic construct
  source 1..20: mol_type = other DNA
cctgcgtgtcgtacttgcgc

SEQ ID NO: 10794 - DNA, 20 bp, synthetic construct
  source 1..20: mol_type = other DNA
cgtacttgcgcaggtcatac

SEQ ID NO: 10795 - DNA, 20 bp, synthetic construct
  source 1..20: mol_type = other DNA
ttgcgcaggtcatacaggtc

SEQ ID NO: 10796 - DNA, 20 bp, synthetic construct
  source 1..20: mol_type = other DNA
tgcgcaggtcatacaggtcg

SEQ ID NO: 10797 - DNA, 20 bp, synthetic construct
  source 1..20: mol_type = other DNA
ttgaagcgcacgtagctgag

SEQ ID NO: 10798 - DNA, 20 bp, synthetic construct
  source 1..20: mol_type = other DNA
cccttgctagaaagcgtata

SEQ ID NO: 10799 - DNA, 20 bp, synthetic construct
  source 1..20: mol_type = other DNA
agaaagcgtatagggccaaa

SEQ ID NO: 10800 - DNA, 20 bp, synthetic construct
  source 1..20: mol_type = other DNA
acaccacggagttaaagtcg

SEQ ID NO: 10801 - DNA, 20 bp, synthetic construct
  source 1..20: mol_type = other DNA
caggctccgtggaagttatg

SEQ ID NO: 10802 - DNA, 20 bp, synthetic construct
  source 1..20: mol_type = other DNA
tgaggaatatcgggagtagc

SEQ ID NO: 10803 - DNA, 20 bp, synthetic construct
  source 1..20: mol_type = other DNA
tatcgggagtagccggaaat

SEQ ID NO: 10804 - DNA, 20 bp, synthetic construct
  source 1..20: mol_type = other DNA
ggcaatgacttgttgtgctc

SEQ ID NO: 10805 - DNA, 20 bp, synthetic construct
  source 1..20: mol_type = other DNA
cgtaatagagtaagtcaaat

SEQ ID NO: 10806 - DNA, 20 bp, synthetic construct
  source 1..20: mol_type = other DNA
gtaattatcctccatggcaa

SEQ ID NO: 10807 - DNA, 20 bp, synthetic construct
  source 1..20: mol_type = other DNA
aaatgtgttgtctataaggg

SEQ ID NO: 10808 - DNA, 20 bp, synthetic construct
  source 1..20: mol_type = other DNA
tatctccgcccaccacgtat

SEQ ID NO: 10809 - DNA, 20 bp, synthetic construct
  source 1..20: mol_type = other DNA
atctccgcccaccacgtatt

SEQ ID NO: 10810 - DNA, 20 bp, synthetic construct
  source 1..20: mol_type = other DNA
ttataaagagtaactcgtag

SEQ ID NO: 10811 - DNA, 20 bp, synthetic construct
  source 1..20: mol_type = other DNA
accgttctgagattgttgca

SEQ ID NO: 10812 - DNA, 20 bp, synthetic construct
  source 1..20: mol_type = other DNA
ccgttctgagattgttgcac

SEQ ID NO: 10813 - DNA, 20 bp, synthetic construct
  source 1..20: mol_type = other DNA
gattgttgcacgggagaacc

SEQ ID NO: 10814 - DNA, 20 bp, synthetic construct
  source 1..20: mol_type = other DNA
acggttacaaagcagaagta

SEQ ID NO: 10815 - DNA, 20 bp, synthetic construct
  source 1..20: mol_type = other DNA
aaatattgcgtatgaacggc

SEQ ID NO: 10816 - DNA, 20 bp, synthetic construct
  source 1..20: mol_type = other DNA
tatgggttacaacaccgccg

SEQ ID NO: 10817 - DNA, 20 bp, synthetic construct
  source 1..20: mol_type = other DNA
cacaacctgttactaccgaa

SEQ ID NO: 10818 - DNA, 20 bp, synthetic construct
  source 1..20: mol_type = other DNA
cactattcctacgagcctcg

SEQ ID NO: 10819 - DNA, 20 bp, synthetic construct
  source 1..20: mol_type = other DNA
ttcctacgagcctcgcggct

SEQ ID NO: 10820 - DNA, 20 bp, synthetic construct
  source 1..20: mol_type = other DNA
agcctcgcggcttggtacac

SEQ ID NO: 10821 - DNA, 20 bp, synthetic construct
  source 1..20: mol_type = other DNA
cacagaccacagcatcgtta

SEQ ID NO: 10822 - DNA, 20 bp, synthetic construct
  source 1..20: mol_type = other DNA
agagacctatagccctgtta

SEQ ID NO: 10823 - DNA, 20 bp, synthetic construct
  source 1..20: mol_type = other DNA
ccctgttaagggaaccgttc

SEQ ID NO: 10824 - DNA, 20 bp, synthetic construct
  source 1..20: mol_type = other DNA
aaccgttccggacccaaatc

SEQ ID NO: 10825 - DNA, 20 bp, synthetic construct
  source 1..20: mol_type = other DNA
cccaaatcaggcaaacgacg

SEQ ID NO: 10826 - DNA, 20 bp, synthetic construct
  source 1..20: mol_type = other DNA
agcgagcacgtgcatcacta

SEQ ID NO: 10827 - DNA, 20 bp, synthetic construct
  source 1..20: mol_type = other DNA
ttgctgaacagttcagccgc

SEQ ID NO: 10828 - DNA, 20 bp, synthetic construct
  source 1..20: mol_type = other DNA
tgctgaacagttcagccgct

SEQ ID NO: 10829 - DNA, 20 bp, synthetic construct
  source 1..20: mol_type = other DNA
tgggctcctgatatatgcac

SEQ ID NO: 10830 - DNA, 20 bp, synthetic construct
  source 1..20: mol_type = other DNA
tcaatgattctcggtacgac

SEQ ID NO: 10831 - DNA, 20 bp, synthetic construct
  source 1..20: mol_type = other DNA
aaattgtgggttagattcga

SEQ ID NO: 10832 - DNA, 20 bp, synthetic construct
  source 1..20: mol_type = other DNA
gtatgactgtatctactacg

SEQ ID NO: 10833 - DNA, 20 bp, synthetic construct
  source 1..20: mol_type = other DNA
gactgtatctactacgcggg

SEQ ID NO: 10834 - DNA, 20 bp, synthetic construct
  source 1..20: mol_type = other DNA
ctactacgcgggaggacata

SEQ ID NO: 10835 - DNA, 20 bp, synthetic construct
  source 1..20: mol_type = other DNA
tatgctatccatgatgagta

SEQ ID NO: 10836 - DNA, 20 bp, synthetic construct
  source 1..20: mol_type = other DNA
ttgcttgcagcaccattgct

SEQ ID NO: 10837 - DNA, 20 bp, synthetic construct
  source 1..20: mol_type = other DNA
gcttgcagcaccattgctcg

SEQ ID NO: 10838 - DNA, 20 bp, synthetic construct
  source 1..20: mol_type = other DNA
gaacaggataaacccaccac

SEQ ID NO: 10839 - DNA, 20 bp, synthetic construct
  source 1..20: mol_type = other DNA
acaatcgtctcgtggaagga

SEQ ID NO: 10840 - DNA, 20 bp, synthetic construct
  source 1..20: mol_type = other DNA
tgtatccatgaatcccatcc

SEQ ID NO: 10841 - DNA, 20 bp, synthetic construct
  source 1..20: mol_type = other DNA
agccggaggagtcaccagtt

SEQ ID NO: 10842 - DNA, 20 bp, synthetic construct
  source 1..20: mol_type = other DNA
gccggaggagtcaccagttc

SEQ ID NO: 10843 - DNA, 20 bp, synthetic construct
  source 1..20: mol_type = other DNA
aaaggttacggcatcaagta

SEQ ID NO: 10844 - DNA, 20 bp, synthetic construct
  source 1..20: mol_type = other DNA
catgtctacactatgcgccg

SEQ ID NO: 10845 - DNA, 20 bp, synthetic construct
  source 1..20: mol_type = other DNA
ccgaggtgaatgaatacctg

SEQ ID NO: 10846 - DNA, 20 bp, synthetic construct
  source 1..20: mol_type = other DNA
gaatacctgcggcaagataa

SEQ ID NO: 10847 - DNA, 20 bp, synthetic construct
  source 1..20: mol_type = other DNA
tggcaccagttacctacgta

SEQ ID NO: 10848 - DNA, 20 bp, synthetic construct
  source 1..20: mol_type = other DNA
ttacctacgtatggcctacg

SEQ ID NO: 10849 - DNA, 20 bp, synthetic construct
  source 1..20: mol_type = other DNA
cggaatagatatcattaagc

SEQ ID NO: 10850 - DNA, 20 bp, synthetic construct
  source 1..20: mol_type = other DNA
aacgataggtacgcgaatta

SEQ ID NO: 10851 - DNA, 20 bp, synthetic construct
  source 1..20: mol_type = other DNA
acttcatccaaacagatgcg

SEQ ID NO: 10852 - DNA, 20 bp, synthetic construct
  source 1..20: mol_type = other DNA
ttatgtctcgcatgcacgct

SEQ ID NO: 10853 - DNA, 20 bp, synthetic construct
  source 1..20: mol_type = other DNA
acgcttctcctacgttatcg

SEQ ID NO: 10854 - DNA, 20 bp, synthetic construct
  source 1..20: mol_type = other DNA
ggttgaacagcgtgctactt

SEQ ID NO: 10855 - DNA, 20 bp, synthetic construct
  source 1..20: mol_type = other DNA
aagcccgctggtaagcccgc

SEQ ID NO: 10856 - DNA, 20 bp, synthetic construct
  source 1..20: mol_type = other DNA
agccggcaatgcgctgatgc

SEQ ID NO: 10857 - DNA, 20 bp, synthetic construct
  source 1..20: mol_type = other DNA
tgtacaagccttatacaata

SEQ ID NO: 10858 - DNA, 20 bp, synthetic construct
  source 1..20: mol_type = other DNA
gtacaagccttatacaataa

SEQ ID NO: 10859 - DNA, 20 bp, synthetic construct
  source 1..20: mol_type = other DNA
tacaagccttatacaataag

SEQ ID NO: 10860 - DNA, 20 bp, synthetic construct
  source 1..20: mol_type = other DNA
tattaaagctgaataagacg

SEQ ID NO: 10861 - DNA, 20 bp, synthetic construct
  source 1..20: mol_type = other DNA
gtctagaacattcattcagc

SEQ ID NO: 10862 - DNA, 20 bp, synthetic construct
  source 1..20: mol_type = other DNA
gataaccagtgtcccagtcg

SEQ ID NO: 10863 - DNA, 20 bp, synthetic construct
  source 1..20: mol_type = other DNA
ataaccagtgtcccagtcga

SEQ ID NO: 10864 - DNA, 20 bp, synthetic construct
  source 1..20: mol_type = other DNA
gaacccgtactctgtaatgc

SEQ ID NO: 10865 - DNA, 20 bp, synthetic construct
  source 1..20: mol_type = other DNA
aacccgtactctgtaatgct

SEQ ID NO: 10866 - DNA, 20 bp, synthetic construct
  source 1..20: mol_type = other DNA
ttctgaactgcgagagttct

SEQ ID NO: 10867 - DNA, 20 bp, synthetic construct
  source 1..20: mol_type = other DNA
atgggatgtcgcatatctct

SEQ ID NO: 10868 - DNA, 20 bp, synthetic construct
  source 1..20: mol_type = other DNA
atctctaggtgccatacgaa

SEQ ID NO: 10869 - DNA, 20 bp, synthetic construct
  source 1..20: mol_type = other DNA
tctctaggtgccatacgaac

SEQ ID NO: 10870 - DNA, 20 bp, synthetic construct
  source 1..20: mol_type = other DNA
cgtgcaactcgtcctgtgct

SEQ ID NO: 10871 - DNA, 20 bp, synthetic construct
  source 1..20: mol_type = other DNA
cgtaaagggtgtcattataa

SEQ ID NO: 10872 - DNA, 20 bp, synthetic construct
  source 1..20: mol_type = other DNA
taattgtgctcgcactgtta

SEQ ID NO: 10873 - DNA, 20 bp, synthetic construct
  source 1..20: mol_type = other DNA
aattgtgctcgcactgttac

SEQ ID NO: 10874 - DNA, 20 bp, synthetic construct
  source 1..20: mol_type = other DNA
tgagcggctgcaatgacctc

SEQ ID NO: 10875 - DNA, 20 bp, synthetic construct
  source 1..20: mol_type = other DNA
agcggctgcaatgacctcag

SEQ ID NO: 10876 - DNA, 20 bp, synthetic construct
  source 1..20: mol_type = other DNA
tagttaaatccgctataagt

SEQ ID NO: 10877 - DNA, 20 bp, synthetic construct
  source 1..20: mol_type = other DNA
tgaatacctgcggccaaacc

SEQ ID NO: 10878 - DNA, 20 bp, synthetic construct
  source 1..20: mol_type = other DNA
tcatcatagtcaaactgtgt

SEQ ID NO: 10879 - DNA, 20 bp, synthetic construct
  source 1..20: mol_type = other DNA
ggtcggaaagaaacttagga

SEQ ID NO: 10880 - DNA, 20 bp, synthetic construct
  source 1..20: mol_type = other DNA
ggtgatagagactgaaacat

SEQ ID NO: 10881 - DNA, 20 bp, synthetic construct
  source 1..20: mol_type = other DNA
aaattctcgagtgttcatgg

SEQ ID NO: 10882 - DNA, 20 bp, synthetic construct
  source 1..20: mol_type = other DNA
aatatctggctgaggagccg

SEQ ID NO: 10883 - DNA, 20 bp, synthetic construct
  source 1..20: mol_type = other DNA
cctattcccgctgttataat

SEQ ID NO: 10884 - DNA, 20 bp, synthetic construct
  source 1..20: mol_type = other DNA
atcgaagagcctgaatagca

SEQ ID NO: 10885 - DNA, 20 bp, synthetic construct
  source 1..20: mol_type = other DNA
ggcatatctgagagctgtac

SEQ ID NO: 10886 - DNA, 20 bp, synthetic construct
  source 1..20: mol_type = other DNA
aagaggctccttattgtacc

SEQ ID NO: 10887 - DNA, 20 bp, synthetic construct
  source 1..20: mol_type = other DNA
gatggtcggtaagttcatgt

SEQ ID NO: 10888 - DNA, 20 bp, synthetic construct
  source 1..20: mol_type = other DNA
aagttcatgtaggacttcca

SEQ ID NO: 10889 - DNA, 20 bp, synthetic construct
  source 1..20: mol_type = other DNA
ccgacggatagtcctgtcat

SEQ ID NO: 10890 - DNA, 20 bp, synthetic construct
  source 1..20: mol_type = other DNA
tcagattaggacgagccagt

SEQ ID NO: 10891 - DNA, 20 bp, synthetic construct
  source 1..20: mol_type = other DNA
gatgttatcacgtgctaggt

SEQ ID NO: 10892 - DNA, 20 bp, synthetic construct
  source 1..20: mol_type = other DNA
atgttatcacgtgctaggtc

SEQ ID NO: 10893 - DNA, 20 bp, synthetic construct
  source 1..20: mol_type = other DNA
cgcttggctaaagttcccgt

SEQ ID NO: 10894 - DNA, 20 bp, synthetic construct
  source 1..20: mol_type = other DNA
caatgtacgaggctacaagc

SEQ ID NO: 10895 - DNA, 20 bp, synthetic construct
  source 1..20: mol_type = other DNA
catataggcgataacgtcga

SEQ ID NO: 10896 - DNA, 20 bp, synthetic construct
  source 1..20: mol_type = other DNA
ggcatcattgacgttggcat

SEQ ID NO: 10897 - DNA, 20 bp, synthetic construct
  source 1..20: mol_type = other DNA
ttgacgttggcataggttct

SEQ ID NO: 10898 - DNA, 20 bp, synthetic construct
  source 1..20: mol_type = other DNA
attgttggtacgaataagat

SEQ ID NO: 10899 - DNA, 20 bp, synthetic construct
  source 1..20: mol_type = other DNA
ctagtaccacttgctctaca

SEQ ID NO: 10900 - DNA, 20 bp, synthetic construct
  source 1..20: mol_type = other DNA
atattgttcaaagcgctcag

SEQ ID NO: 10901 - DNA, 20 bp, synthetic construct
  source 1..20: mol_type = other DNA
ttcaaagcgctcagagggtt

SEQ ID NO: 10902 - DNA, 20 bp, synthetic construct
  source 1..20: mol_type = other DNA
cgaagttgcagtacattata

SEQ ID NO: 10903 - DNA, 20 bp, synthetic construct
  source 1..20: mol_type = other DNA
tccaggcctaattcaccgcc

SEQ ID NO: 10904 - DNA, 20 bp, synthetic construct
  source 1..20: mol_type = other DNA
ggccatcaaagaatcaatta

SEQ ID NO: 10905 - DNA, 20 bp, synthetic construct
  source 1..20: mol_type = other DNA
ggtgcagtcgcattggtagt

SEQ ID NO: 10906 - DNA, 20 bp, synthetic construct
  source 1..20: mol_type = other DNA
gtcgcattggtagttggatc

SEQ ID NO: 10907 - DNA, 20 bp, synthetic construct
  source 1..20: mol_type = other DNA
tccgagccagtcaataagat

SEQ ID NO: 10908 - DNA, 20 bp, synthetic construct
  source 1..20: mol_type = other DNA
gccagtcaataagattggct

SEQ ID NO: 10909 - DNA, 20 bp, synthetic construct
  source 1..20: mol_type = other DNA
attggctcggttcacgttag

SEQ ID NO: 10910 - DNA, 20 bp, synthetic construct
  source 1..20: mol_type = other DNA
tagcctggcgaatgagttcc

SEQ ID NO: 10911 - DNA, 20 bp, synthetic construct
  source 1..20: mol_type = other DNA
gcccaattcttgttgtaggc

SEQ ID NO: 10912 - DNA, 20 bp, synthetic construct
  source 1..20: mol_type = other DNA
cccaattcttgttgtaggct

SEQ ID NO: 10913 - DNA, 20 bp, synthetic construct
  source 1..20: mol_type = other DNA
taccaagtcccactgggagt

SEQ ID NO: 10914 - DNA, 20 bp, synthetic construct
  source 1..20: mol_type = other DNA
tgggctgcagcattcctgtt

SEQ ID NO: 10915 - DNA, 20 bp, synthetic construct
  source 1..20: mol_type = other DNA
gtatagtgccgggcgccact

SEQ ID NO: 10916 - DNA, 20 bp, synthetic construct
  source 1..20: mol_type = other DNA
tatagtgccgggcgccactt

SEQ ID NO: 10917 - DNA, 20 bp, synthetic construct
  source 1..20: mol_type = other DNA
atagtgccgggcgccacttg

SEQ ID NO: 10918 - DNA, 20 bp, synthetic construct
  source 1..20: mol_type = other DNA
aggactaataaacctatcgg

SEQ ID NO: 10919 - DNA, 20 bp, synthetic construct
  source 1..20: mol_type = other DNA
ggactaataaacctatcgga

SEQ ID NO: 10920 - DNA, 20 bp, synthetic construct
  source 1..20: mol_type = other DNA
atcggagggaagtaattgcg

SEQ ID NO: 10921 - DNA, 20 bp, synthetic construct
  source 1..20: mol_type = other DNA
tgtgtatagccgtcctcatc

SEQ ID NO: 10922 - DNA, 20 bp, synthetic construct
  source 1..20: mol_type = other DNA
gccgtcctcatcaggaagaa

SEQ ID NO: 10923 - DNA, 20 bp, synthetic construct
  source 1..20: mol_type = other DNA
gtgtgataacgccgaacctg

SEQ ID NO: 10924 - DNA, 20 bp, synthetic construct
  source 1..20: mol_type = other DNA
ccaatgttaataagctcaat

SEQ ID NO: 10925 - DNA, 20 bp, synthetic construct
  source 1..20: mol_type = other DNA
aagtaaagttccgctgcctc

SEQ ID NO: 10926 - DNA, 20 bp, synthetic construct
  source 1..20: mol_type = other DNA
gaaggtgaagaagacgtcct

SEQ ID NO: 10927 - DNA, 20 bp, synthetic construct
  source 1..20: mol_type = other DNA
cgttaactctcacagtagag

SEQ ID NO: 10928 - DNA, 20 bp, synthetic construct
  source 1..20: mol_type = other DNA
atgttgaatatattcaagca

SEQ ID NO: 10929 - DNA, 20 bp, synthetic construct
  source 1..20: mol_type = other DNA
tagatctgcaagggcgacat

SEQ ID NO: 10930 - DNA, 20 bp, synthetic construct
  source 1..20: mol_type = other DNA
cccaagcatgtctccaatcc

SEQ ID NO: 10931 - DNA, 20 bp, synthetic construct
  source 1..20: mol_type = other DNA
tggaaagagaacgcccgata

SEQ ID NO: 10932 - DNA, 20 bp, synthetic construct
  source 1..20: mol_type = other DNA
ggcttgctctgacgggacgg

SEQ ID NO: 10933 - DNA, 20 bp, synthetic construct
  source 1..20: mol_type = other DNA
gcttgctctgacgggacgga

SEQ ID NO: 10934 - DNA, 20 bp, synthetic construct
  source 1..20: mol_type = other DNA
gacggagggtaccaacgctt

SEQ ID NO: 10935 - DNA, 20 bp, synthetic construct
  source 1..20: mol_type = other DNA
taccaacgcttcggccttgt

SEQ ID NO: 10936 - DNA, 20 bp, synthetic construct
  source 1..20: mol_type = other DNA
agcattatccgtaaagacgt

SEQ ID NO: 10937 - DNA, 20 bp, synthetic construct
  source 1..20: mol_type = other DNA
gacgttggagtcgttacctg

SEQ ID NO: 10938 - DNA, 20 bp, synthetic construct
  source 1..20: mol_type = other DNA
gttggagtcgttacctgcgg

SEQ ID NO: 10939 - DNA, 20 bp, synthetic construct
  source 1..20: mol_type = other DNA
gagtcgttacctgcggaggt

SEQ ID NO: 10940 - DNA, 20 bp, synthetic construct
  source 1..20: mol_type = other DNA
gcacgccatccaacatctgc

SEQ ID NO: 10941 - DNA, 20 bp, synthetic construct
  source 1..20: mol_type = other DNA
cttccagagctcgatagaag

SEQ ID NO: 10942 - DNA, 20 bp, synthetic construct
  source 1..20: mol_type = other DNA
gcgttaaattggagtaaatc

SEQ ID NO: 10943 - DNA, 20 bp, synthetic construct
  source 1..20: mol_type = other DNA
cgttaaattggagtaaatct

SEQ ID NO: 10944 - DNA, 20 bp, synthetic construct
  source 1..20: mol_type = other DNA
aagtattaattgcctggttg

SEQ ID NO: 10945 - DNA, 20 bp, synthetic construct
  source 1..20: mol_type = other DNA
gaggtcaacctgcgaccgcg

SEQ ID NO: 10946 - DNA, 20 bp, synthetic construct
  source 1..20: mol_type = other DNA
ttcttctcgtgcggctgcgt

SEQ ID NO: 10947 - DNA, 20 bp, synthetic construct
  source 1..20: mol_type = other DNA
aagacttagatcaagcgcga

SEQ ID NO: 10948 - DNA, 20 bp, synthetic construct
  source 1..20: mol_type = other DNA
tctcgaagcctcgttatgtt

SEQ ID NO: 10949 - DNA, 20 bp, synthetic construct
  source 1..20: mol_type = other DNA
cctcgttatgttcggcgtca

SEQ ID NO: 10950 - DNA, 20 bp, synthetic construct
  source 1..20: mol_type = other DNA
cattaaaggtctgtcgcaac

SEQ ID NO: 10951 - DNA, 20 bp, synthetic construct
  source 1..20: mol_type = other DNA
ggtctgtcgcaacaggttca

SEQ ID NO: 10952 - DNA, 20 bp, synthetic construct
  source 1..20: mol_type = other DNA
acgatatactgcttcaatca

SEQ ID NO: 10953 - DNA, 20 bp, synthetic construct
  source 1..20: mol_type = other DNA
attaatgacttcttcattgg

SEQ ID NO: 10954 - DNA, 20 bp, synthetic construct
  source 1..20: mol_type = other DNA
gcgctcgtgaagttgcttaa

SEQ ID NO: 10955 - DNA, 20 bp, synthetic construct
  source 1..20: mol_type = other DNA
ccgcgcgcagtccatgagtt

SEQ ID NO: 10956 - DNA, 20 bp, synthetic construct
  source 1..20: mol_type = other DNA
cgcgcgcagtccatgagtta

SEQ ID NO: 10957 - DNA, 20 bp, synthetic construct
  source 1..20: mol_type = other DNA
ggtggaaccggctcgaggat

SEQ ID NO: 10958 - DNA, 20 bp, synthetic construct
  source 1..20: mol_type = other DNA
gtggaaccggctcgaggatc

SEQ ID NO: 10959 - DNA, 20 bp, synthetic construct
  source 1..20: mol_type = other DNA
ttgtgcaagcatatacagct

SEQ ID NO: 10960 - DNA, 20 bp, synthetic construct
  source 1..20: mol_type = other DNA
tccgcggcaaagtacaaaca

SEQ ID NO: 10961 - DNA, 20 bp, synthetic construct
  source 1..20: mol_type = other DNA
cactccagcggagttcaccg

SEQ ID NO: 10962 - DNA, 20 bp, synthetic construct
  source 1..20: mol_type = other DNA
ctacaccggagtgaaattag

SEQ ID NO: 10963 - DNA, 20 bp, synthetic construct
  source 1..20: mol_type = other DNA
ctgatcgccgactagcggtc

SEQ ID NO: 10964 - DNA, 20 bp, synthetic construct
  source 1..20: mol_type = other DNA
ccgactagcggtctggatca

SEQ ID NO: 10965 - DNA, 20 bp, synthetic construct
  source 1..20: mol_type = other DNA
gcggtctggatcatggagtc

SEQ ID NO: 10966 - DNA, 20 bp, synthetic construct
  source 1..20: mol_type = other DNA
gcgcacgcgtattgccattg

SEQ ID NO: 10967 - DNA, 20 bp, synthetic construct
  source 1..20: mol_type = other DNA
cacgcgtattgccattgagg

SEQ ID NO: 10968 - DNA, 20 bp, synthetic construct
  source 1..20: mol_type = other DNA
ttcggtcctaccggatggaa

SEQ ID NO: 10969 - DNA, 20 bp, synthetic construct
  source 1..20: mol_type = other DNA
catagccgattcggctacta

SEQ ID NO: 10970 - DNA, 20 bp, synthetic construct
  source 1..20: mol_type = other DNA
agccgattcggctactaagg

SEQ ID NO: 10971 - DNA, 20 bp, synthetic construct
  source 1..20: mol_type = other DNA
cgattcggctactaaggagg

SEQ ID NO: 10972 - DNA, 20 bp, synthetic construct
  source 1..20: mol_type = other DNA
ggatgttcctatatgttatt

SEQ ID NO: 10973 - DNA, 20 bp, synthetic construct
  source 1..20: mol_type = other DNA
gcatcacaatgccgtcaata

SEQ ID NO: 10974 - DNA, 20 bp, synthetic construct
  source 1..20: mol_type = other DNA
aacacctaacctagtcgtgc

SEQ ID NO: 10975 - DNA, 20 bp, synthetic construct
  source 1..20: mol_type = other DNA
cggcctgcaccgcacgttga

SEQ ID NO: 10976 - DNA, 20 bp, synthetic construct
  source 1..20: mol_type = other DNA
attacaagtcctgctatgta

SEQ ID NO: 10977 - DNA, 20 bp, synthetic construct
  source 1..20: mol_type = other DNA
tacggcgataagcataccac

SEQ ID NO: 10978 - DNA, 20 bp, synthetic construct
  source 1..20: mol_type = other DNA
caccgccattcccgaagaaa

SEQ ID NO: 10979 - DNA, 20 bp, synthetic construct
  source 1..20: mol_type = other DNA
cttaaaccgcgcgcagcaaa

SEQ ID NO: 10980 - DNA, 20 bp, synthetic construct
  source 1..20: mol_type = other DNA
cacagcgaagcgtaatacaa

SEQ ID NO: 10981 - DNA, 20 bp, synthetic construct
  source 1..20: mol_type = other DNA
tacaacggttaaatatgtta

SEQ ID NO: 10982 - DNA, 20 bp, synthetic construct
  source 1..20: mol_type = other DNA
acggtcaatgtcatagtaaa

SEQ ID NO: 10983 - DNA, 20 bp, synthetic construct
  source 1..20: mol_type = other DNA
tcctcccagtaccgatgaag

SEQ ID NO: 10984 - DNA, 20 bp, synthetic construct
  source 1..20: mol_type = other DNA
gtaccgatgaagaggttata

SEQ ID NO: 10985 - DNA, 20 bp, synthetic construct
  source 1..20: mol_type = other DNA
tcgccgccgttggaagatga

SEQ ID NO: 10986 - DNA, 20 bp, synthetic construct
  source 1..20: mol_type = other DNA
agacggcgttaaggccaatc

SEQ ID NO: 10987 - DNA, 20 bp, synthetic construct
  source 1..20: mol_type = other DNA
gaatcgcattctatgcatga

SEQ ID NO: 10988 - DNA, 20 bp, synthetic construct
  source 1..20: mol_type = other DNA
cattatattcaaacgcaagt

SEQ ID NO: 10989 - DNA, 20 bp, synthetic construct
  source 1..20: mol_type = other DNA
gcacttgatggttcaagtgg

SEQ ID NO: 10990 - DNA, 20 bp, synthetic construct
  source 1..20: mol_type = other DNA
cttgatggttcaagtggtgg

SEQ ID NO: 10991 - DNA, 20 bp, synthetic construct
  source 1..20: mol_type = other DNA
gagtacatggtccctatgcg

SEQ ID NO: 10992 - DNA, 20 bp, synthetic construct
  source 1..20: mol_type = other DNA
aggcgcggcaataccgtaaa

SEQ ID NO: 10993 - DNA, 20 bp, synthetic construct
  source 1..20: mol_type = other DNA
ggcgcggcaataccgtaaat

SEQ ID NO: 10994 - DNA, 20 bp, synthetic construct
  source 1..20: mol_type = other DNA
aataccgtaaatgggattca

SEQ ID NO: 10995 - DNA, 20 bp, synthetic construct
  source 1..20: mol_type = other DNA
gacctgaactggagacgaca

SEQ ID NO: 10996 - DNA, 20 bp, synthetic construct
  source 1..20: mol_type = other DNA
attcgcaacaacacgttgga

SEQ ID NO: 10997 - DNA, 20 bp, synthetic construct
  source 1..20: mol_type = other DNA
cgtacatgagtaaatgacga

SEQ ID NO: 10998 - DNA, 20 bp, synthetic construct
  source 1..20: mol_type = other DNA
catgagtaaatgacgatggt

SEQ ID NO: 10999 - DNA, 20 bp, synthetic construct
  source 1..20: mol_type = other DNA
atgagtaaatgacgatggtt

SEQ ID NO: 11000 - DNA, 20 bp, synthetic construct
  source 1..20: mol_type = other DNA
tcctatagaggacgacacga

SEQ ID NO: 11001 - DNA, 20 bp, synthetic construct
  source 1..20: mol_type = other DNA
gaggacgacacgatggtgta

SEQ ID NO: 11002 - DNA, 20 bp, synthetic construct
  source 1..20: mol_type = other DNA
aggacgacacgatggtgtat

SEQ ID NO: 11003 - DNA, 20 bp, synthetic construct
  source 1..20: mol_type = other DNA
ggtattagtactgcgtctaa

SEQ ID NO: 11004 - DNA, 20 bp, synthetic construct
  source 1..20: mol_type = other DNA
tagatatatgcgaataatga

SEQ ID NO: 11005 - DNA, 20 bp, synthetic construct
  source 1..20: mol_type = other DNA
gaggattgttcagcctctac

SEQ ID NO: 11006 - DNA, 20 bp, synthetic construct
  source 1..20: mol_type = other DNA
ttcgcgctaaagatctcctg

SEQ ID NO: 11007 - DNA, 20 bp, synthetic construct
  source 1..20: mol_type = other DNA
ccgcacaattcccgacttgt

SEQ ID NO: 11008 - DNA, 20 bp, synthetic construct
  source 1..20: mol_type = other DNA
cccggccacggaccggtggt

SEQ ID NO: 11009 - DNA, 20 bp, synthetic construct
  source 1..20: mol_type = other DNA
tccagcatatattgcgtcaa

SEQ ID NO: 11010 - DNA, 20 bp, synthetic construct
  source 1..20: mol_type = other DNA
ttgcgtcaagggttctgata

SEQ ID NO: 11011 - DNA, 20 bp, synthetic construct
  source 1..20: mol_type = other DNA
ctgatacggactgcgccgcc

SEQ ID NO: 11012 - DNA, 20 bp, synthetic construct
  source 1..20: mol_type = other DNA
gagtatattgtagccttatg

SEQ ID NO: 11013 - DNA, 20 bp, synthetic construct
  source 1..20: mol_type = other DNA
attgtagccttatgaggtcc

SEQ ID NO: 11014 - DNA, 20 bp, synthetic construct
  source 1..20: mol_type = other DNA
gatggcactcatctgctcgc

SEQ ID NO: 11015 - DNA, 20 bp, synthetic construct
  source 1..20: mol_type = other DNA
atgttgttaataaacacgta

SEQ ID NO: 11016 - DNA, 20 bp, synthetic construct
  source 1..20: mol_type = other DNA
gtcgaagggaagcacgccac

SEQ ID NO: 11017 - DNA, 20 bp, synthetic construct
  source 1..20: mol_type = other DNA
ttcctggtccgacagcatga

SEQ ID NO: 11018 - DNA, 20 bp, synthetic construct
  source 1..20: mol_type = other DNA
ctgcacaagacgagtatcga

SEQ ID NO: 11019 - DNA, 20 bp, synthetic construct
  source 1..20: mol_type = other DNA
gagtatcgatggaaacccgt

SEQ ID NO: 11020 - DNA, 20 bp, synthetic construct
  source 1..20: mol_type = other DNA
tcggtaataatccacaatac

SEQ ID NO: 11021 - DNA, 20 bp, synthetic construct
  source 1..20: mol_type = other DNA
gctgttgcagatgaacccgt

SEQ ID NO: 11022 - DNA, 20 bp, synthetic construct
  source 1..20: mol_type = other DNA
acccgtaggcctgcgcctcc

SEQ ID NO: 11023 - DNA, 20 bp, synthetic construct
  source 1..20: mol_type = other DNA
gtacaccagggtcctgccga

SEQ ID NO: 11024 - DNA, 20 bp, synthetic construct
  source 1..20: mol_type = other DNA
cgccatgatgtgaatcatat

SEQ ID NO: 11025 - DNA, 20 bp, synthetic construct
  source 1..20: mol_type = other DNA
ccatgatgtgaatcatattg

SEQ ID NO: 11026 - DNA, 20 bp, synthetic construct
  source 1..20: mol_type = other DNA
cgtagaagtcatgcgttgtc

SEQ ID NO: 11027 - DNA, 20 bp, synthetic construct
  source 1..20: mol_type = other DNA
tcatgcgttgtcaggcctat

SEQ ID NO: 11028 - DNA, 20 bp, synthetic construct
  source 1..20: mol_type = other DNA
tgcgttgtcaggcctatagg

SEQ ID NO: 11029 - DNA, 20 bp, synthetic construct
  source 1..20: mol_type = other DNA
ggccgtggacactgtgaatc

SEQ ID NO: 11030 - DNA, 20 bp, synthetic construct
  source 1..20: mol_type = other DNA
cggcgttgcgcacgtagttc

SEQ ID NO: 11031 - DNA, 20 bp, synthetic construct
  source 1..20: mol_type = other DNA
ggcgttgcgcacgtagttca

SEQ ID NO: 11032 - DNA, 20 bp, synthetic construct
  source 1..20: mol_type = other DNA
cgtagttcagggcgagctgc

SEQ ID NO: 11033 - DNA, 20 bp, synthetic construct
  source 1..20: mol_type = other DNA
gtagttcagggcgagctgct

SEQ ID NO: 11034 - DNA, 20 bp, synthetic construct
  source 1..20: mol_type = other DNA
gcccatatctacgcgaaata

SEQ ID NO: 11035 - DNA, 20 bp, synthetic construct
  source 1..20: mol_type = other DNA
aataaggtgatagattccac

SEQ ID NO: 11036 - DNA, 20 bp, synthetic construct
  source 1..20: mol_type = other DNA
aaggtgatagattccaccgg

SEQ ID NO: 11037 - DNA, 20 bp, synthetic construct
  source 1..20: mol_type = other DNA
accggaggagcccgctccga

SEQ ID NO: 11038 - DNA, 20 bp, synthetic construct
  source 1..20: mol_type = other DNA
ctgcttgttataatgcatgt

SEQ ID NO: 11039 - DNA, 20 bp, synthetic construct
  source 1..20: mol_type = other DNA
tgcttgttataatgcatgta

SEQ ID NO: 11040 - DNA, 20 bp, synthetic construct
  source 1..20: mol_type = other DNA
atacacttctgagtaccatg

SEQ ID NO: 11041 - DNA, 20 bp, synthetic construct
  source 1..20: mol_type = other DNA
tacacttctgagtaccatgt

SEQ ID NO: 11042 - DNA, 20 bp, synthetic construct
  source 1..20: mol_type = other DNA
acacttctgagtaccatgtg

SEQ ID NO: 11043 - DNA, 20 bp, synthetic construct
  source 1..20: mol_type = other DNA
gggctcgttgataattgatg

SEQ ID NO: 11044 - DNA, 20 bp, synthetic construct
  source 1..20: mol_type = other DNA
ggctcgttgataattgatgg

SEQ ID NO: 11045 - DNA, 20 bp, synthetic construct
  source 1..20: mol_type = other DNA
atcctgcacctgcccattaa

SEQ ID NO: 11046 - DNA, 20 bp, synthetic construct
  source 1..20: mol_type = other DNA
aacgggacccgaactcttcg

SEQ ID NO: 11047 - DNA, 20 bp, synthetic construct
  source 1..20: mol_type = other DNA
aaagtagttcggcctcaacg

SEQ ID NO: 11048 - DNA, 20 bp, synthetic construct
  source 1..20: mol_type = other DNA
aacgcggctcatgacgctcc

SEQ ID NO: 11049 - DNA, 20 bp, synthetic construct
  source 1..20: mol_type = other DNA
acgcggctcatgacgctcca

SEQ ID NO: 11050 - DNA, 20 bp, synthetic construct
  source 1..20: mol_type = other DNA
atcaaagtccgcattatacc

SEQ ID NO: 11051 - DNA, 20 bp, synthetic construct
  source 1..20: mol_type = other DNA
atgctgcttcgttcgagaga

SEQ ID NO: 11052 - DNA, 20 bp, synthetic construct
  source 1..20: mol_type = other DNA
cgtcgccagtgacgacatca

SEQ ID NO: 11053 - DNA, 20 bp, synthetic construct
  source 1..20: mol_type = other DNA
cagtgacgacatcacggtaa

SEQ ID NO: 11054 - DNA, 20 bp, synthetic construct
  source 1..20: mol_type = other DNA
gagaccctcaatatcgtgaa

SEQ ID NO: 11055 - DNA, 20 bp, synthetic construct
  source 1..20: mol_type = other DNA
aacttgcagcgttcgtgcaa

SEQ ID NO: 11056 - DNA, 20 bp, synthetic construct
  source 1..20: mol_type = other DNA
cagcgttcgtgcaaaggaaa

SEQ ID NO: 11057 - DNA, 20 bp, synthetic construct
  source 1..20: mol_type = other DNA
tgggatagccaacctcgtcc

SEQ ID NO: 11058 - DNA, 20 bp, synthetic construct
  source 1..20: mol_type = other DNA
agccaacctcgtccaggtga

SEQ ID NO: 11059 - DNA, 20 bp, synthetic construct
  source 1..20: mol_type = other DNA
aaggtctgagttcccgcaga

SEQ ID NO: 11060 - DNA, 20 bp, synthetic construct
  source 1..20: mol_type = other DNA
accggctgatcgaccatacc

SEQ ID NO: 11061 - DNA, 20 bp, synthetic construct
  source 1..20: mol_type = other DNA
accatacctggctgcccagt

SEQ ID NO: 11062 - DNA, 20 bp, synthetic construct
  source 1..20: mol_type = other DNA
cgaattcttccctccttgcg

SEQ ID NO: 11063 - DNA, 20 bp, synthetic construct
  source 1..20: mol_type = other DNA
ggaagtcttcgcatgataga

SEQ ID NO: 11064 - DNA, 20 bp, synthetic construct
  source 1..20: mol_type = other DNA
cttcgcatgatagagggagc

SEQ ID NO: 11065 - DNA, 20 bp, synthetic construct
  source 1..20: mol_type = other DNA
ttcgcatgatagagggagcg

SEQ ID NO: 11066 - DNA, 20 bp, synthetic construct
  source 1..20: mol_type = other DNA
gatgccaggtcgtatgctga

SEQ ID NO: 11067 - DNA, 20 bp, synthetic construct
  source 1..20: mol_type = other DNA
atgccaggtcgtatgctgat

SEQ ID NO: 11068 - DNA, 20 bp, synthetic construct
  source 1..20: mol_type = other DNA
gccaggtcgtatgctgatgg

SEQ ID NO: 11069 - DNA, 20 bp, synthetic construct
  source 1..20: mol_type = other DNA
ccaggtcgtatgctgatggg

SEQ ID NO: 11070 - DNA, 20 bp, synthetic construct
  source 1..20: mol_type = other DNA
atgaagagcggctgaagcac

SEQ ID NO: 11071 - DNA, 20 bp, synthetic construct
  source 1..20: mol_type = other DNA
gcatgcatctgcagtatccc

SEQ ID NO: 11072 - DNA, 20 bp, synthetic construct
  source 1..20: mol_type = other DNA
catgcatctgcagtatccca

SEQ ID NO: 11073 - DNA, 20 bp, synthetic construct
  source 1..20: mol_type = other DNA
gtcccatacattgcttgcgc

SEQ ID NO: 11074 - DNA, 20 bp, synthetic construct
  source 1..20: mol_type = other DNA
accggcaatattgaactgaa

SEQ ID NO: 11075 - DNA, 20 bp, synthetic construct
  source 1..20: mol_type = other DNA
ggcaatattgaactgaacgg

SEQ ID NO: 11076 - DNA, 20 bp, synthetic construct
  source 1..20: mol_type = other DNA
cctaccgcacgggcctgaag

SEQ ID NO: 11077 - DNA, 20 bp, synthetic construct
  source 1..20: mol_type = other DNA
tccgcgtacgtcaaatgctt

SEQ ID NO: 11078 - DNA, 20 bp, synthetic construct
  source 1..20: mol_type = other DNA
gcttggcaagatgcgctgag

SEQ ID NO: 11079 - DNA, 20 bp, synthetic construct
  source 1..20: mol_type = other DNA
gagtggtagttgttgtatcc

SEQ ID NO: 11080 - DNA, 20 bp, synthetic construct
  source 1..20: mol_type = other DNA
gttgttgtatcccggctcat

SEQ ID NO: 11081 - DNA, 20 bp, synthetic construct
  source 1..20: mol_type = other DNA
tcccggctcatagggcccat

SEQ ID NO: 11082 - DNA, 20 bp, synthetic construct
  source 1..20: mol_type = other DNA
cccattggcattgcgtacga

SEQ ID NO: 11083 - DNA, 20 bp, synthetic construct
  source 1..20: mol_type = other DNA
taaactgcgccttaagccta

SEQ ID NO: 11084 - DNA, 20 bp, synthetic construct
  source 1..20: mol_type = other DNA
aaactgcgccttaagcctaa

SEQ ID NO: 11085 - DNA, 20 bp, synthetic construct
  source 1..20: mol_type = other DNA
attgcgcttgcgctgcacga

SEQ ID NO: 11086 - DNA, 20 bp, synthetic construct
  source 1..20: mol_type = other DNA
tgcctggtggactaccgttg

SEQ ID NO: 11087 - DNA, 20 bp, synthetic construct
  source 1..20: mol_type = other DNA
tctgggctgtaaggtctcgc

SEQ ID NO: 11088 - DNA, 20 bp, synthetic construct
  source 1..20: mol_type = other DNA
tggactcctccgttctcgtt

SEQ ID NO: 11089 - DNA, 20 bp, synthetic construct
  source 1..20: mol_type = other DNA
aaagcccgaatccctaacgg

SEQ ID NO: 11090 - DNA, 20 bp, synthetic construct
  source 1..20: mol_type = other DNA
aatgctaacagcctaccacc

SEQ ID NO: 11091 - DNA, 20 bp, synthetic construct
  source 1..20: mol_type = other DNA
cttcttgctcgtattaagag

SEQ ID NO: 11092 - DNA, 20 bp, synthetic construct
  source 1..20: mol_type = other DNA
ctcgtattaagagcgggaag

SEQ ID NO: 11093 - DNA, 20 bp, synthetic construct
  source 1..20: mol_type = other DNA
tcgtattaagagcgggaagt

SEQ ID NO: 11094 - DNA, 20 bp, synthetic construct
  source 1..20: mol_type = other DNA
gcccgttggctactatgtaa

SEQ ID NO: 11095 - DNA, 20 bp, synthetic construct
  source 1..20: mol_type = other DNA
tagaggcatcgccgtcattc

SEQ ID NO: 11096 - DNA, 20 bp, synthetic construct
  source 1..20: mol_type = other DNA
gcagaccagctatacagcct

SEQ ID NO: 11097 - DNA, 20 bp, synthetic construct
  source 1..20: mol_type = other DNA
ctatacagcctaggtaccac

SEQ ID NO: 11098 - DNA, 20 bp, synthetic construct
  source 1..20: mol_type = other DNA
gggcaatctgttgacgcaac

SEQ ID NO: 11099 - DNA, 20 bp, synthetic construct
  source 1..20: mol_type = other DNA
ggcaatctgttgacgcaaca

SEQ ID NO: 11100 - DNA, 20 bp, synthetic construct
  source 1..20: mol_type = other DNA
gcaatctgttgacgcaacag

SEQ ID NO: 11101 - DNA, 20 bp, synthetic construct
  source 1..20: mol_type = other DNA
ttagcgctaaattggtgtcc

SEQ ID NO: 11102 - DNA, 20 bp, synthetic construct
  source 1..20: mol_type = other DNA
gagaaattaattacgtcaga

SEQ ID NO: 11103 - DNA, 20 bp, synthetic construct
  source 1..20: mol_type = other DNA
caatcctgggttatcgatct

SEQ ID NO: 11104 - DNA, 20 bp, synthetic construct
  source 1..20: mol_type = other DNA
tgggttatcgatcttggaat

SEQ ID NO: 11105 - DNA, 20 bp, synthetic construct
  source 1..20: mol_type = other DNA
ctaggacgttacctggacgc

SEQ ID NO: 11106 - DNA, 20 bp, synthetic construct
  source 1..20: mol_type = other DNA
taggacgttacctggacgca

SEQ ID NO: 11107 - DNA, 20 bp, synthetic construct
  source 1..20: mol_type = other DNA
aggacgttacctggacgcag

SEQ ID NO: 11108 - DNA, 20 bp, synthetic construct
  source 1..20: mol_type = other DNA
gcatcttgttggaatcgata

SEQ ID NO: 11109 - DNA, 20 bp, synthetic construct
  source 1..20: mol_type = other DNA
taaggaccaaaccgcgctcg

SEQ ID NO: 11110 - DNA, 20 bp, synthetic construct
  source 1..20: mol_type = other DNA
agacctcgcagagcctgcga

SEQ ID NO: 11111 - DNA, 20 bp, synthetic construct
  source 1..20: mol_type = other DNA
tgcgaaggaaatcagcgaaa

SEQ ID NO: 11112 - DNA, 20 bp, synthetic construct
  source 1..20: mol_type = other DNA
gccataagcttcttcagccg

SEQ ID NO: 11113 - DNA, 20 bp, synthetic construct
  source 1..20: mol_type = other DNA
ccataagcttcttcagccgg

SEQ ID NO: 11114 - DNA, 20 bp, synthetic construct
  source 1..20: mol_type = other DNA
cataagcttcttcagccggg

SEQ ID NO: 11115 - DNA, 20 bp, synthetic construct
  source 1..20: mol_type = other DNA
taccaccatgttgggagaac

SEQ ID NO: 11116 - DNA, 20 bp, synthetic construct
  source 1..20: mol_type = other DNA
tactcgataaatgctaatca

SEQ ID NO: 11117 - DNA, 20 bp, synthetic construct
  source 1..20: mol_type = other DNA
accgcatgtggtatcatatt

SEQ ID NO: 11118 - DNA, 20 bp, synthetic construct
  source 1..20: mol_type = other DNA
aattcctaagggtaagccga

SEQ ID NO: 11119 - DNA, 20 bp, synthetic construct
  source 1..20: mol_type = other DNA
tgcaatgttatgtaagtcgt

SEQ ID NO: 11120 - DNA, 20 bp, synthetic construct
  source 1..20: mol_type = other DNA
gtgaggataacatgttcttc

SEQ ID NO: 11121 - DNA, 20 bp, synthetic construct
  source 1..20: mol_type = other DNA
ttcttcaggttcgtcgtcac

SEQ ID NO: 11122 - DNA, 20 bp, synthetic construct
  source 1..20: mol_type = other DNA
cgtgtctaaataggcctgca

SEQ ID NO: 11123 - DNA, 20 bp, synthetic construct
  source 1..20: mol_type = other DNA
atggccttgcgtattaaatg

SEQ ID NO: 11124 - DNA, 20 bp, synthetic construct
  source 1..20: mol_type = other DNA
tgatcttgttgatacgccaa

SEQ ID NO: 11125 - DNA, 20 bp, synthetic construct
  source 1..20: mol_type = other DNA
ttgttgatacgccaatggcg

SEQ ID NO: 11126 - DNA, 20 bp, synthetic construct
  source 1..20: mol_type = other DNA
acgccaatggcgaggactta

SEQ ID NO: 11127 - DNA, 20 bp, synthetic construct
  source 1..20: mol_type = other DNA
ggcgaggacttaaggagatt

SEQ ID NO: 11128 - DNA, 20 bp, synthetic construct
  source 1..20: mol_type = other DNA
gcgaggacttaaggagattc

SEQ ID NO: 11129 - DNA, 20 bp, synthetic construct
  source 1..20: mol_type = other DNA
gaggacttaaggagattcgg

SEQ ID NO: 11130 - DNA, 20 bp, synthetic construct
  source 1..20: mol_type = other DNA
ctcatccgagcttatagagt

SEQ ID NO: 11131 - DNA, 20 bp, synthetic construct
  source 1..20: mol_type = other DNA
ctgctgttagcaagctgtac

SEQ ID NO: 11132 - DNA, 20 bp, synthetic construct
  source 1..20: mol_type = other DNA
aacggccgctattaaatcaa

SEQ ID NO: 11133 - DNA, 20 bp, synthetic construct
  source 1..20: mol_type = other DNA
tcgcgaggtaataagtcgca

SEQ ID NO: 11134 - DNA, 20 bp, synthetic construct
  source 1..20: mol_type = other DNA
aagtcgcacggagtcctccg

SEQ ID NO: 11135 - DNA, 20 bp, synthetic construct
  source 1..20: mol_type = other DNA
catcgtatagtgaaatgaag

SEQ ID NO: 11136 - DNA, 20 bp, synthetic construct
  source 1..20: mol_type = other DNA
atcgtatagtgaaatgaagc

SEQ ID NO: 11137 - DNA, 20 bp, synthetic construct
  source 1..20: mol_type = other DNA
tggatgagtacctgctccat

SEQ ID NO: 11138 - DNA, 20 bp, synthetic construct
  source 1..20: mol_type = other DNA
caatacttgaaagggttctt

SEQ ID NO: 11139 - DNA, 20 bp, synthetic construct
  source 1..20: mol_type = other DNA
ctgcgagtgttcgaggtatt

SEQ ID NO: 11140 - DNA, 20 bp, synthetic construct
  source 1..20: mol_type = other DNA
aatacggatgctgtgcatcg

SEQ ID NO: 11141 - DNA, 20 bp, synthetic construct
  source 1..20: mol_type = other DNA
atacggatgctgtgcatcgc

SEQ ID NO: 11142 - DNA, 20 bp, synthetic construct
  source 1..20: mol_type = other DNA
gcagcgacgtacaaatgctc

SEQ ID NO: 11143 - DNA, 20 bp, synthetic construct
  source 1..20: mol_type = other DNA
ggtaattccctgtatgagct

SEQ ID NO: 11144 - DNA, 20 bp, synthetic construct
  source 1..20: mol_type = other DNA
gtaattccctgtatgagctt

SEQ ID NO: 11145 - DNA, 20 bp, synthetic construct
  source 1..20: mol_type = other DNA
tagctcggagtacgtccaca

SEQ ID NO: 11146 - DNA, 20 bp, synthetic construct
  source 1..20: mol_type = other DNA
agctcggagtacgtccacac

SEQ ID NO: 11147 - DNA, 20 bp, synthetic construct
  source 1..20: mol_type = other DNA
gctcggagtacgtccacacg

SEQ ID NO: 11148 - DNA, 20 bp, synthetic construct
  source 1..20: mol_type = other DNA
cccgtatccataggcctcaa

SEQ ID NO: 11149 - DNA, 20 bp, synthetic construct
  source 1..20: mol_type = other DNA
cataggcctcaaaggtattg

SEQ ID NO: 11150 - DNA, 20 bp, synthetic construct
  source 1..20: mol_type = other DNA
ctcaaaggtattgaggacgg

SEQ ID NO: 11151 - DNA, 20 bp, synthetic construct
  source 1..20: mol_type = other DNA
ccggcgtgatggatggacta

SEQ ID NO: 11152 - DNA, 20 bp, synthetic construct
  source 1..20: mol_type = other DNA
cggcgtgatggatggactaa

SEQ ID NO: 11153 - DNA, 20 bp, synthetic construct
  source 1..20: mol_type = other DNA
ggcgtgatggatggactaag

SEQ ID NO: 11154 - DNA, 20 bp, synthetic construct
  source 1..20: mol_type = other DNA
ctggttggtgaacccatcaa

SEQ ID NO: 11155 - DNA, 20 bp, synthetic construct
  source 1..20: mol_type = other DNA
tgtgcgtacttagcaagctc

SEQ ID NO: 11156 - DNA, 20 bp, synthetic construct
  source 1..20: mol_type = other DNA
gattgtcacgttgcgctcac

SEQ ID NO: 11157 - DNA, 20 bp, synthetic construct
  source 1..20: mol_type = other DNA
attgtcacgttgcgctcact

SEQ ID NO: 11158 - DNA, 20 bp, synthetic construct
  source 1..20: mol_type = other DNA
ttgtcacgttgcgctcactg

SEQ ID NO: 11159 - DNA, 20 bp, synthetic construct
  source 1..20: mol_type = other DNA
tgtcacgttgcgctcactgg

SEQ ID NO: 11160 - DNA, 20 bp, synthetic construct
  source 1..20: mol_type = other DNA
gtcacgttgcgctcactggg

SEQ ID NO: 11161 - DNA, 20 bp, synthetic construct
  source 1..20: mol_type = other DNA
cataatcatctcgtaccgca

SEQ ID NO: 11162 - DNA, 20 bp, synthetic construct
  source 1..20: mol_type = other DNA
acccgatgagaatacgcagc

SEQ ID NO: 11163 - DNA, 20 bp, synthetic construct
  source 1..20: mol_type = other DNA
cgatgagaatacgcagctgg

SEQ ID NO: 11164 - DNA, 20 bp, synthetic construct
  source 1..20: mol_type = other DNA
tacgcagctggtggccttcc

SEQ ID NO: 11165 - DNA, 20 bp, synthetic construct
  source 1..20: mol_type = other DNA
caggcttcgttcgcgtacag

SEQ ID NO: 11166 - DNA, 20 bp, synthetic construct
  source 1..20: mol_type = other DNA
aggcttcgttcgcgtacagc

SEQ ID NO: 11167 - DNA, 20 bp, synthetic construct
  source 1..20: mol_type = other DNA
tgcagaatggtgaaccgtac

SEQ ID NO: 11168 - DNA, 20 bp, synthetic construct
  source 1..20: mol_type = other DNA
accgtactggaataaactga

SEQ ID NO: 11169 - DNA, 20 bp, synthetic construct
  source 1..20: mol_type = other DNA
tgtgtgctcatcgcgaatcg

SEQ ID NO: 11170 - DNA, 20 bp, synthetic construct
  source 1..20: mol_type = other DNA
atcgcgaatcgcggcgcaga

SEQ ID NO: 11171 - DNA, 20 bp, synthetic construct
  source 1..20: mol_type = other DNA
agcagcgggtcgttcccaca

SEQ ID NO: 11172 - DNA, 20 bp, synthetic construct
  source 1..20: mol_type = other DNA
gcagcgggtcgttcccacag

SEQ ID NO: 11173 - DNA, 20 bp, synthetic construct
  source 1..20: mol_type = other DNA
ccgacatgcggacccgattg

SEQ ID NO: 11174 - DNA, 20 bp, synthetic construct
  source 1..20: mol_type = other DNA
gccaatcccgagatgtgcgt

SEQ ID NO: 11175 - DNA, 20 bp, synthetic construct
  source 1..20: mol_type = other DNA
aatcccgagatgtgcgttgg

SEQ ID NO: 11176 - DNA, 20 bp, synthetic construct
  source 1..20: mol_type = other DNA
gctgccactcacattaaagg

SEQ ID NO: 11177 - DNA, 20 bp, synthetic construct
  source 1..20: mol_type = other DNA
cttgccatagaaagggcagt

SEQ ID NO: 11178 - DNA, 20 bp, synthetic construct
  source 1..20: mol_type = other DNA
ttaaacaggccgtaagcctt

SEQ ID NO: 11179 - DNA, 20 bp, synthetic construct
  source 1..20: mol_type = other DNA
tcaagctgatactcagacat

SEQ ID NO: 11180 - DNA, 20 bp, synthetic construct
  source 1..20: mol_type = other DNA
caagctgatactcagacatg

SEQ ID NO: 11181 - DNA, 20 bp, synthetic construct
  source 1..20: mol_type = other DNA
cattcgatgaaatgtaagta

SEQ ID NO: 11182 - DNA, 20 bp, synthetic construct
  source 1..20: mol_type = other DNA
aaacagttgctggcgctgga

SEQ ID NO: 11183 - DNA, 20 bp, synthetic construct
  source 1..20: mol_type = other DNA
aacagttgctggcgctggag

SEQ ID NO: 11184 - DNA, 20 bp, synthetic construct
  source 1..20: mol_type = other DNA
ccgttgggcagctcatgccg

SEQ ID NO: 11185 - DNA, 20 bp, synthetic construct
  source 1..20: mol_type = other DNA
gctcatgccgcggaaccaaa

SEQ ID NO: 11186 - DNA, 20 bp, synthetic construct
  source 1..20: mol_type = other DNA
gacgtattccatgacactcc

SEQ ID NO: 11187 - DNA, 20 bp, synthetic construct
  source 1..20: mol_type = other DNA
tccatgacactcccggttac

SEQ ID NO: 11188 - DNA, 20 bp, synthetic construct
  source 1..20: mol_type = other DNA
gggcgttgccgacatgaaga

SEQ ID NO: 11189 - DNA, 20 bp, synthetic construct
  source 1..20: mol_type = other DNA
cgacatgaagacggccctgg

SEQ ID NO: 11190 - DNA, 20 bp, synthetic construct
  source 1..20: mol_type = other DNA
atgccgtgattcaaccgacg

SEQ ID NO: 11191 - DNA, 20 bp, synthetic construct
  source 1..20: mol_type = other DNA
tcatgtagtggttcatgaat

SEQ ID NO: 11192 - DNA, 20 bp, synthetic construct
  source 1..20: mol_type = other DNA
gttcatgaattggcgcgcaa

SEQ ID NO: 11193 - DNA, 20 bp, synthetic construct
  source 1..20: mol_type = other DNA
agacgcgagtagggtgtgtt

SEQ ID NO: 11194 - DNA, 20 bp, synthetic construct
  source 1..20: mol_type = other DNA
atgcaattggagacccttga

SEQ ID NO: 11195 - DNA, 20 bp, synthetic construct
  source 1..20: mol_type = other DNA
aattggagacccttgatgga

SEQ ID NO: 11196 - DNA, 20 bp, synthetic construct
  source 1..20: mol_type = other DNA
agacccttgatggaaggaaa

SEQ ID NO: 11197 - DNA, 20 bp, synthetic construct
  source 1..20: mol_type = other DNA
ggaaggaaagggcgacgcgt

SEQ ID NO: 11198 - DNA, 20 bp, synthetic construct
  source 1..20: mol_type = other DNA
gaaggaaagggcgacgcgta

SEQ ID NO: 11199 - DNA, 20 bp, synthetic construct
  source 1..20: mol_type = other DNA
aaggaaagggcgacgcgtag

SEQ ID NO: 11200 - DNA, 20 bp, synthetic construct
  source 1..20: mol_type = other DNA
aaagtctgcggcatccaatt

SEQ ID NO: 11201 - DNA, 20 bp, synthetic construct
  source 1..20: mol_type = other DNA
tcagctaattgttcgtcgct

SEQ ID NO: 11202 - DNA, 20 bp, synthetic construct
  source 1..20: mol_type = other DNA
attgttcgtcgcttggaatg

SEQ ID NO: 11203 - DNA, 20 bp, synthetic construct
  source 1..20: mol_type = other DNA
ttgttcgtcgcttggaatgt

SEQ ID NO: 11204 - DNA, 20 bp, synthetic construct
  source 1..20: mol_type = other DNA
gcttggaatgtgggactgca

SEQ ID NO: 11205 - DNA, 20 bp, synthetic construct
  source 1..20: mol_type = other DNA
tcgacttgcagtcaacagac

SEQ ID NO: 11206 - DNA, 20 bp, synthetic construct
  source 1..20: mol_type = other DNA
agaccggttatagtaaacga

SEQ ID NO: 11207 - DNA, 20 bp, synthetic construct
  source 1..20: mol_type = other DNA
tagaagaatcgcagttgttc

SEQ ID NO: 11208 - DNA, 20 bp, synthetic construct
  source 1..20: mol_type = other DNA
agaagaatcgcagttgttcc

SEQ ID NO: 11209 - DNA, 20 bp, synthetic construct
  source 1..20: mol_type = other DNA
cgggatatctggcgatcgta

SEQ ID NO: 11210 - DNA, 20 bp, synthetic construct
  source 1..20: mol_type = other DNA
gggatatctggcgatcgtat

SEQ ID NO: 11211 - DNA, 20 bp, synthetic construct
  source 1..20: mol_type = other DNA
tggcgatcgtatgggctaaa

SEQ ID NO: 11212 - DNA, 20 bp, synthetic construct
  source 1..20: mol_type = other DNA
taattccctcgcgggttgac

SEQ ID NO: 11213 - DNA, 20 bp, synthetic construct
  source 1..20: mol_type = other DNA
atatcgtaagatggtgctgt

SEQ ID NO: 11214 - DNA, 20 bp, synthetic construct
  source 1..20: mol_type = other DNA
gttcaaatggtacttaatac

SEQ ID NO: 11215 - DNA, 20 bp, synthetic construct
  source 1..20: mol_type = other DNA
aacgcggagacgctgaatca

SEQ ID NO: 11216 - DNA, 20 bp, synthetic construct
  source 1..20: mol_type = other DNA
aatggcaagtacgttcacca

SEQ ID NO: 11217 - DNA, 20 bp, synthetic construct
  source 1..20: mol_type = other DNA
ggcaagtacgttcaccacgg

SEQ ID NO: 11218 - DNA, 20 bp, synthetic construct
  source 1..20: mol_type = other DNA
tagatataatcgtcgagcag

SEQ ID NO: 11219 - DNA, 20 bp, synthetic construct
  source 1..20: mol_type = other DNA
agatataatcgtcgagcagc

SEQ ID NO: 11220 - DNA, 20 bp, synthetic construct
  source 1..20: mol_type = other DNA
gttctgcattaacattccca

SEQ ID NO: 11221 - DNA, 20 bp, synthetic construct
  source 1..20: mol_type = other DNA
tcgcgaatatctgcagccgc

SEQ ID NO: 11222 - DNA, 20 bp, synthetic construct
  source 1..20: mol_type = other DNA
tcatacgtctccatgggaga

SEQ ID NO: 11223 - DNA, 20 bp, synthetic construct
  source 1..20: mol_type = other DNA
cgtctccatgggagatggcg

SEQ ID NO: 11224 - DNA, 20 bp, synthetic construct
  source 1..20: mol_type = other DNA
gcaagcgggagcatggactc

SEQ ID NO: 11225 - DNA, 20 bp, synthetic construct
  source 1..20: mol_type = other DNA
agcgggagcatggactctgg

SEQ ID NO: 11226 - DNA, 20 bp, synthetic construct
  source 1..20: mol_type = other DNA
tggagggtggatatccgtat

SEQ ID NO: 11227 - DNA, 20 bp, synthetic construct
  source 1..20: mol_type = other DNA
acgtagatgcccatagagat

SEQ ID NO: 11228 - DNA, 20 bp, synthetic construct
  source 1..20: mol_type = other DNA
ccatagagataggcggtgaa

SEQ ID NO: 11229 - DNA, 20 bp, synthetic construct
  source 1..20: mol_type = other DNA
catagagataggcggtgaaa

SEQ ID NO: 11230 - DNA, 20 bp, synthetic construct
  source 1..20: mol_type = other DNA
agataggcggtgaaagggca

SEQ ID NO: 11231 - DNA, 20 bp, synthetic construct
  source 1..20: mol_type = other DNA
gttgagtgtatcccagcgtt

SEQ ID NO: 11232 - DNA, 20 bp, synthetic construct
  source 1..20: mol_type = other DNA
aatattgtcacctatgacgg

SEQ ID NO: 11233 - DNA, 20 bp, synthetic construct
  source 1..20: mol_type = other DNA
tgtcacctatgacggtggtt

SEQ ID NO: 11234 - DNA, 20 bp, synthetic construct
  source 1..20: mol_type = other DNA
agtgcgacgaatagcatgcc

SEQ ID NO: 11235 - DNA, 20 bp, synthetic construct
  source 1..20: mol_type = other DNA
acgaatagcatgccaggcat

SEQ ID NO: 11236 - DNA, 20 bp, synthetic construct
  source 1..20: mol_type = other DNA
tgtgtgccagatcttcaaga

SEQ ID NO: 11237 - DNA, 20 bp, synthetic construct
  source 1..20: mol_type = other DNA
aatgctgacgacgatatcct

SEQ ID NO: 11238 - DNA, 20 bp, synthetic construct
  source 1..20: mol_type = other DNA
atgctgacgacgatatcctc

SEQ ID NO: 11239 - DNA, 20 bp, synthetic construct
  source 1..20: mol_type = other DNA
ggcatgatgtattcgcagtg

SEQ ID NO: 11240 - DNA, 20 bp, synthetic construct
  source 1..20: mol_type = other DNA
agagacactcggttgcgatt

SEQ ID NO: 11241 - DNA, 20 bp, synthetic construct
  source 1..20: mol_type = other DNA
gaaggcctatgcgcaacaaa

SEQ ID NO: 11242 - DNA, 20 bp, synthetic construct
  source 1..20: mol_type = other DNA
atatcgatgaaacgctgcag

SEQ ID NO: 11243 - DNA, 20 bp, synthetic construct
  source 1..20: mol_type = other DNA
cgatgaaacgctgcagaggt

SEQ ID NO: 11244 - DNA, 20 bp, synthetic construct
  source 1..20: mol_type = other DNA
aagcgtccttgtaacacctt

SEQ ID NO: 11245 - DNA, 20 bp, synthetic construct
  source 1..20: mol_type = other DNA
aggtcccgttattcgctgga

SEQ ID NO: 11246 - DNA, 20 bp, synthetic construct
  source 1..20: mol_type = other DNA
ccgttattcgctggatggaa

SEQ ID NO: 11247 - DNA, 20 bp, synthetic construct
  source 1..20: mol_type = other DNA
cgttattcgctggatggaac

SEQ ID NO: 11248 - DNA, 20 bp, synthetic construct
  source 1..20: mol_type = other DNA
cagcggtcgcagaccgagtg

SEQ ID NO: 11249 - DNA, 20 bp, synthetic construct
  source 1..20: mol_type = other DNA
cgagctcatcgtaaatgcca

SEQ ID NO: 11250 - DNA, 20 bp, synthetic construct
  source 1..20: mol_type = other DNA
gcgcgatgtgtatgttcccg

SEQ ID NO: 11251 - DNA, 20 bp, synthetic construct
  source 1..20: mol_type = other DNA
cgatgtgtatgttcccgagg

SEQ ID NO: 11252 - DNA, 20 bp, synthetic construct
  source 1..20: mol_type = other DNA
agccggaacgaacatcaata

SEQ ID NO: 11253 - DNA, 20 bp, synthetic construct
  source 1..20: mol_type = other DNA
cgtcgggctgaagctcgcca

SEQ ID NO: 11254 - DNA, 20 bp, synthetic construct
  source 1..20: mol_type = other DNA
tcgccatggtgcattcgcag

SEQ ID NO: 11255 - DNA, 20 bp, synthetic construct
  source 1..20: mol_type = other DNA
cgccatggtgcattcgcagt

SEQ ID NO: 11256 - DNA, 20 bp, synthetic construct
  source 1..20: mol_type = other DNA
gccattcttaccaccgccga

SEQ ID NO: 11257 - DNA, 20 bp, synthetic construct
  source 1..20: mol_type = other DNA
ctcctaccattacaccctcc

SEQ ID NO: 11258 - DNA, 20 bp, synthetic construct
  source 1..20: mol_type = other DNA
cgagctcatgcccgtatacc

SEQ ID NO: 11259 - DNA, 20 bp, synthetic construct
  source 1..20: mol_type = other DNA
tgcccgtataccaggaacta

SEQ ID NO: 11260 - DNA, 20 bp, synthetic construct
  source 1..20: mol_type = other DNA
tcttcgcgcctgccaatgcg

SEQ ID NO: 11261 - DNA, 20 bp, synthetic construct
  source 1..20: mol_type = other DNA
ctgccaatgcgcggcctacg

SEQ ID NO: 11262 - DNA, 20 bp, synthetic construct
  source 1..20: mol_type = other DNA
tgccaatgcgcggcctacgt

SEQ ID NO: 11263 - DNA, 20 bp, synthetic construct
  source 1..20: mol_type = other DNA
tgcgcggcctacgtgggaaa

SEQ ID NO: 11264 - DNA, 20 bp, synthetic construct
  source 1..20: mol_type = other DNA
caatgataagccttgccgca

SEQ ID NO: 11265 - DNA, 20 bp, synthetic construct
  source 1..20: mol_type = other DNA
aatgataagccttgccgcac

SEQ ID NO: 11266 - DNA, 20 bp, synthetic construct
  source 1..20: mol_type = other DNA
gcctaatagcacgatacata

SEQ ID NO: 11267 - DNA, 20 bp, synthetic construct
  source 1..20: mol_type = other DNA
gatacatacggcgaccatta

SEQ ID NO: 11268 - DNA, 20 bp, synthetic construct
  source 1..20: mol_type = other DNA
ctatagcctgcaccctctgc

SEQ ID NO: 11269 - DNA, 20 bp, synthetic construct
  source 1..20: mol_type = other DNA
gaacacgtgtccattatcaa

SEQ ID NO: 11270 - DNA, 20 bp, synthetic construct
  source 1..20: mol_type = other DNA
acacgtgtccattatcaacg

SEQ ID NO: 11271 - DNA, 20 bp, synthetic construct
  source 1..20: mol_type = other DNA
gttatagtgggttccattcc

SEQ ID NO: 11272 - DNA, 20 bp, synthetic construct
  source 1..20: mol_type = other DNA
gcatagaatggaccggccag

SEQ ID NO: 11273 - DNA, 20 bp, synthetic construct
  source 1..20: mol_type = other DNA
agaatggaccggccagcgga

SEQ ID NO: 11274 - DNA, 20 bp, synthetic construct
  source 1..20: mol_type = other DNA
atatacgcgtgcccgcaatg

SEQ ID NO: 11275 - DNA, 20 bp, synthetic construct
  source 1..20: mol_type = other DNA
tatacgcgtgcccgcaatgc

SEQ ID NO: 11276 - DNA, 20 bp, synthetic construct
  source 1..20: mol_type = other DNA
acgcgtgcccgcaatgcggg

SEQ ID NO: 11277 - DNA, 20 bp, synthetic construct
  source 1..20: mol_type = other DNA
cgcgtgcccgcaatgcggga

SEQ ID NO: 11278 - DNA, 20 bp, synthetic construct
  source 1..20: mol_type = other DNA
ggactgcatgctactcgcgg

SEQ ID NO: 11279 - DNA, 20 bp, synthetic construct
  source 1..20: mol_type = other DNA
tgcatgctactcgcggcgga

SEQ ID NO: 11280 - DNA, 20 bp, synthetic construct
  source 1..20: mol_type = other DNA
gcatgctactcgcggcggaa

SEQ ID NO: 11281 - DNA, 20 bp, synthetic construct
  source 1..20: mol_type = other DNA
catgctactcgcggcggaag

SEQ ID NO: 11282 - DNA, 20 bp, synthetic construct
  source 1..20: mol_type = other DNA
ttgcgcacgggactgaccct

SEQ ID NO: 11283 - DNA, 20 bp, synthetic construct
  source 1..20: mol_type = other DNA
cttctgcggcatgatctccc

SEQ ID NO: 11284 - DNA, 20 bp, synthetic construct
  source 1..20: mol_type = other DNA
tgcggcatgatctccctggg

SEQ ID NO: 11285 - DNA, 20 bp, synthetic construct
  source 1..20: mol_type = other DNA
gcggcatgatctccctggga

SEQ ID NO: 11286 - DNA, 20 bp, synthetic construct
  source 1..20: mol_type = other DNA
acaaacattacaacggactc

SEQ ID NO: 11287 - DNA, 20 bp, synthetic construct
  source 1..20: mol_type = other DNA
gcagggaattgtgcaggtat

SEQ ID NO: 11288 - DNA, 20 bp, synthetic construct
  source 1..20: mol_type = other DNA
tgcgtgcgttgatcaagatc

SEQ ID NO: 11289 - DNA, 20 bp, synthetic construct
  source 1..20: mol_type = other DNA
gcgttgatcaagatctggat

SEQ ID NO: 11290 - DNA, 20 bp, synthetic construct
  source 1..20: mol_type = other DNA
gctgatacgtgtgtacgaaa

SEQ ID NO: 11291 - DNA, 20 bp, synthetic construct
  source 1..20: mol_type = other DNA
taccctggatgactcggcaa

SEQ ID NO: 11292 - DNA, 20 bp, synthetic construct
  source 1..20: mol_type = other DNA
acaagctggatgccatcgag

SEQ ID NO: 11293 - DNA, 20 bp, synthetic construct
  source 1..20: mol_type = other DNA
cagattcccaacttcttaga

SEQ ID NO: 11294 - DNA, 20 bp, synthetic construct
  source 1..20: mol_type = other DNA
acttcttagacggaatgacg

SEQ ID NO: 11295 - DNA, 20 bp, synthetic construct
  source 1..20: mol_type = other DNA
cttcttagacggaatgacgc

SEQ ID NO: 11296 - DNA, 20 bp, synthetic construct
  source 1..20: mol_type = other DNA
ttccaacaaccgtgaacgaa

SEQ ID NO: 11297 - DNA, 20 bp, synthetic construct
  source 1..20: mol_type = other DNA
aaagccgcccagtattaccc

SEQ ID NO: 11298 - DNA, 20 bp, synthetic construct
  source 1..20: mol_type = other DNA
ttcataggcataggaagctt

SEQ ID NO: 11299 - DNA, 20 bp, synthetic construct
  source 1..20: mol_type = other DNA
gcataggaagcttcggctcc

SEQ ID NO: 11300 - DNA, 20 bp, synthetic construct
  source 1..20: mol_type = other DNA
tgtattgccgcttgctatta

SEQ ID NO: 11301 - DNA, 20 bp, synthetic construct
  source 1..20: mol_type = other DNA
ggagtacggcgccaacccat

SEQ ID NO: 11302 - DNA, 20 bp, synthetic construct
  source 1..20: mol_type = other DNA
gtacggcgccaacccatcgg

SEQ ID NO: 11303 - DNA, 20 bp, synthetic construct
  source 1..20: mol_type = other DNA
tacggcgccaacccatcgga

SEQ ID NO: 11304 - DNA, 20 bp, synthetic construct
  source 1..20: mol_type = other DNA
gggctggaagtacaccactt

SEQ ID NO: 11305 - DNA, 20 bp, synthetic construct
  source 1..20: mol_type = other DNA
caccacttgggcccggcaac

SEQ ID NO: 11306 - DNA, 20 bp, synthetic construct
  source 1..20: mol_type = other DNA
agattactatactcccgctg

SEQ ID NO: 11307 - DNA, 20 bp, synthetic construct
  source 1..20: mol_type = other DNA
ggccaatactactacagcta

SEQ ID NO: 11308 - DNA, 20 bp, synthetic construct
  source 1..20: mol_type = other DNA
aaatagtctcaaccgtatcg

SEQ ID NO: 11309 - DNA, 20 bp, synthetic construct
  source 1..20: mol_type = other DNA
tatatgcgtggctaccttac

SEQ ID NO: 11310 - DNA, 20 bp, synthetic construct
  source 1..20: mol_type = other DNA
gcttaagctgcgcattatca

SEQ ID NO: 11311 - DNA, 20 bp, synthetic construct
  source 1..20: mol_type = other DNA
agccgcattctaagcgagca

SEQ ID NO: 11312 - DNA, 20 bp, synthetic construct
  source 1..20: mol_type = other DNA
aatgcaagctcgtcttgata

SEQ ID NO: 11313 - DNA, 20 bp, synthetic construct
  source 1..20: mol_type = other DNA
tcccggcgccagcgtatggc

SEQ ID NO: 11314 - DNA, 20 bp, synthetic construct
  source 1..20: mol_type = other DNA
atggctggaggaaattgatg

SEQ ID NO: 11315 - DNA, 20 bp, synthetic construct
  source 1..20: mol_type = other DNA
ggaaattgatgcggtggaaa

SEQ ID NO: 11316 - DNA, 20 bp, synthetic construct
  source 1..20: mol_type = other DNA
agttatcaaatcttcttgtg

SEQ ID NO: 11317 - DNA, 20 bp, synthetic construct
  source 1..20: mol_type = other DNA
tcggccaataatgatccggc

SEQ ID NO: 11318 - DNA, 20 bp, synthetic construct
  source 1..20: mol_type = other DNA
cgaacggcctgattgatatg

SEQ ID NO: 11319 - DNA, 20 bp, synthetic construct
  source 1..20: mol_type = other DNA
atatgtggcagcggcaccgc

SEQ ID NO: 11320 - DNA, 20 bp, synthetic construct
  source 1..20: mol_type = other DNA
gcggtggtgacgcgggtctg

SEQ ID NO: 11321 - DNA, 20 bp, synthetic construct
  source 1..20: mol_type = other DNA
ttgggtactgctcaatatcg

SEQ ID NO: 11322 - DNA, 20 bp, synthetic construct
  source 1..20: mol_type = other DNA
ggtactgctcaatatcgagg

SEQ ID NO: 11323 - DNA, 20 bp, synthetic construct
  source 1..20: mol_type = other DNA
gtactgctcaatatcgaggt

SEQ ID NO: 11324 - DNA, 20 bp, synthetic construct
  source 1..20: mol_type = other DNA
ctgccacctgaatgagatcg

SEQ ID NO: 11325 - DNA, 20 bp, synthetic construct
  source 1..20: mol_type = other DNA
aatgagatcgcggctataga

SEQ ID NO: 11326 - DNA, 20 bp, synthetic construct
  source 1..20: mol_type = other DNA
taaattgttccgtcataaac

SEQ ID NO: 11327 - DNA, 20 bp, synthetic construct
  source 1..20: mol_type = other DNA
ttccgtcataaacaggtccg

SEQ ID NO: 11328 - DNA, 20 bp, synthetic construct
  source 1..20: mol_type = other DNA
atcctcgatcttatacccac

SEQ ID NO: 11329 - DNA, 20 bp, synthetic construct
  source 1..20: mol_type = other DNA
tcctcgatcttatacccacc

SEQ ID NO: 11330 - DNA, 20 bp, synthetic construct
  source 1..20: mol_type = other DNA
catcttgcaagacccgcgac

SEQ ID NO: 11331 - DNA, 20 bp, synthetic construct
  source 1..20: mol_type = other DNA
ccgcgacaggccgtgcaccg

SEQ ID NO: 11332 - DNA, 20 bp, synthetic construct
  source 1..20: mol_type = other DNA
aagtccataacaacattgac

SEQ ID NO: 11333 - DNA, 20 bp, synthetic construct
  source 1..20: mol_type = other DNA
aacaacattgactgggacga

SEQ ID NO: 11334 - DNA, 20 bp, synthetic construct
  source 1..20: mol_type = other DNA
acaacattgactgggacgag

SEQ ID NO: 11335 - DNA, 20 bp, synthetic construct
  source 1..20: mol_type = other DNA
aggaatccatagatgtgcta

SEQ ID NO: 11336 - DNA, 20 bp, synthetic construct
  source 1..20: mol_type = other DNA
aaagtatgtaccgttgtggg

SEQ ID NO: 11337 - DNA, 20 bp, synthetic construct
  source 1..20: mol_type = other DNA
aagtatgtaccgttgtgggc

SEQ ID NO: 11338 - DNA, 20 bp, synthetic construct
  source 1..20: mol_type = other DNA
gcgggagcaaacccacctat

SEQ ID NO: 11339 - DNA, 20 bp, synthetic construct
  source 1..20: mol_type = other DNA
attggtatcaccacattaga

SEQ ID NO: 11340 - DNA, 20 bp, synthetic construct
  source 1..20: mol_type = other DNA
tccatgccgatgagtatgat

SEQ ID NO: 11341 - DNA, 20 bp, synthetic construct
  source 1..20: mol_type = other DNA
aagacgaattagaacagtac

SEQ ID NO: 11342 - DNA, 20 bp, synthetic construct
  source 1..20: mol_type = other DNA
ctacaacccaaccatcatta

SEQ ID NO: 11343 - DNA, 20 bp, synthetic construct
  source 1..20: mol_type = other DNA
gtacattaaagacatatcac

SEQ ID NO: 11344 - DNA, 20 bp, synthetic construct
  source 1..20: mol_type = other DNA
cgccaccaggcatcaaacga

SEQ ID NO: 11345 - DNA, 20 bp, synthetic construct
  source 1..20: mol_type = other DNA
acatattccctaccagtggc

SEQ ID NO: 11346 - DNA, 20 bp, synthetic construct
  source 1..20: mol_type = other DNA
catagcgagcccgttctcgc

SEQ ID NO: 11347 - DNA, 20 bp, synthetic construct
  source 1..20: mol_type = other DNA
atcttgaatatcttcatacg

SEQ ID NO: 11348 - DNA, 20 bp, synthetic construct
  source 1..20: mol_type = other DNA
acaacacgggcttgatataa

SEQ ID NO: 11349 - DNA, 20 bp, synthetic construct
  source 1..20: mol_type = other DNA
acacgggcttgatataaagg

SEQ ID NO: 11350 - DNA, 20 bp, synthetic construct
  source 1..20: mol_type = other DNA
tcaaggagatagacctccta

SEQ ID NO: 11351 - DNA, 20 bp, synthetic construct
  source 1..20: mol_type = other DNA
ttattccctatccctcccga

SEQ ID NO: 11352 - DNA, 20 bp, synthetic construct
  source 1..20: mol_type = other DNA
gatacagatacccagattgt

SEQ ID NO: 11353 - DNA, 20 bp, synthetic construct
  source 1..20: mol_type = other DNA
atacagatacccagattgtg

SEQ ID NO: 11354 - DNA, 20 bp, synthetic construct
  source 1..20: mol_type = other DNA
ctgcatcgtcctaaccctaa

SEQ ID NO: 11355 - DNA, 20 bp, synthetic construct
  source 1..20: mol_type = other DNA
cttatggtgcgtctaagtat

SEQ ID NO: 11356 - DNA, 20 bp, synthetic construct
  source 1..20: mol_type = other DNA
aacagcccgttaagatactg

SEQ ID NO: 11357 - DNA, 20 bp, synthetic construct
  source 1..20: mol_type = other DNA
cgaccttcacggcactgccg

SEQ ID NO: 11358 - DNA, 20 bp, synthetic construct
  source 1..20: mol_type = other DNA
tgccgagggcattcctctgg

SEQ ID NO: 11359 - DNA, 20 bp, synthetic construct
  source 1..20: mol_type = other DNA
gccgagggcattcctctgga

SEQ ID NO: 11360 - DNA, 20 bp, synthetic construct
  source 1..20: mol_type = other DNA
aaattaaatatacgctgcct

SEQ ID NO: 11361 - DNA, 20 bp, synthetic construct
  source 1..20: mol_type = other DNA
attaaatatacgctgcctag

SEQ ID NO: 11362 - DNA, 20 bp, synthetic construct
  source 1..20: mol_type = other DNA
aacaagagccgcgccaaaga

SEQ ID NO: 11363 - DNA, 20 bp, synthetic construct
  source 1..20: mol_type = other DNA
atactgcctgctagactccc

SEQ ID NO: 11364 - DNA, 20 bp, synthetic construct
  source 1..20: mol_type = other DNA
ttaaagccttatgggcaaac

SEQ ID NO: 11365 - DNA, 20 bp, synthetic construct
  source 1..20: mol_type = other DNA
caaacaggcgcaaatatcat

SEQ ID NO: 11366 - DNA, 20 bp, synthetic construct
  source 1..20: mol_type = other DNA
cgcaaatatcataggagtac

SEQ ID NO: 11367 - DNA, 20 bp, synthetic construct
  source 1..20: mol_type = other DNA
gcaataccacttcgagttca

SEQ ID NO: 11368 - DNA, 20 bp, synthetic construct
  source 1..20: mol_type = other DNA
tctactcctagttccgaaat

SEQ ID NO: 11369 - DNA, 20 bp, synthetic construct
  source 1..20: mol_type = other DNA
atgtgatacaagactcttaa

SEQ ID NO: 11370 - DNA, 20 bp, synthetic construct
  source 1..20: mol_type = other DNA
cctatcgtccacacagttaa

SEQ ID NO: 11371 - DNA, 20 bp, synthetic construct
  source 1..20: mol_type = other DNA
tgaagtagatcaacactatt

SEQ ID NO: 11372 - DNA, 20 bp, synthetic construct
  source 1..20: mol_type = other DNA
ttcgataagcttaataacac

SEQ ID NO: 11373 - DNA, 20 bp, synthetic construct
  source 1..20: mol_type = other DNA
taacaccgggagtatcttgc

SEQ ID NO: 11374 - DNA, 20 bp, synthetic construct
  source 1..20: mol_type = other DNA
aacaccgggagtatcttgca

SEQ ID NO: 11375 - DNA, 20 bp, synthetic construct
  source 1..20: mol_type = other DNA
gaaatacatgtgctgcgttg

SEQ ID NO: 11376 - DNA, 20 bp, synthetic construct
  source 1..20: mol_type = other DNA
aaacgcatattgtgcctggg

SEQ ID NO: 11377 - DNA, 20 bp, synthetic construct
  source 1..20: mol_type = other DNA
gccctcgtaggatatgctat

SEQ ID NO: 11378 - DNA, 20 bp, synthetic construct
  source 1..20: mol_type = other DNA
tacaagcggttggcagggat

SEQ ID NO: 11379 - DNA, 20 bp, synthetic construct
  source 1..20: mol_type = other DNA
gccgttgaaggcacattcaa

SEQ ID NO: 11380 - DNA, 20 bp, synthetic construct
  source 1..20: mol_type = other DNA
cctcgggcggtagcgcatcg

SEQ ID NO: 11381 - DNA, 20 bp, synthetic construct
  source 1..20: mol_type = other DNA
gcgccttcacttgatcctct

SEQ ID NO: 11382 - DNA, 20 bp, synthetic construct
  source 1..20: mol_type = other DNA
tctcgggccttatcccagta

SEQ ID NO: 11383 - DNA, 20 bp, synthetic construct
  source 1..20: mol_type = other DNA
ccttatcccagtacggctct

SEQ ID NO: 11384 - DNA, 20 bp, synthetic construct
  source 1..20: mol_type = other DNA
gcggcgaattccaaacctgc

SEQ ID NO: 11385 - DNA, 20 bp, synthetic construct
  source 1..20: mol_type = other DNA
tggaggacaggactaacgta

SEQ ID NO: 11386 - DNA, 20 bp, synthetic construct
  source 1..20: mol_type = other DNA
ggaggacaggactaacgtat

SEQ ID NO: 11387 - DNA, 20 bp, synthetic construct
  source 1..20: mol_type = other DNA
cgtatgggtcggcccatctt

SEQ ID NO: 11388 - DNA, 20 bp, synthetic construct
  source 1..20: mol_type = other DNA
acgcgaagatgctgatcata

SEQ ID NO: 11389 - DNA, 20 bp, synthetic construct
  source 1..20: mol_type = other DNA
cgcgaagatgctgatcatac

SEQ ID NO: 11390 - DNA, 20 bp, synthetic construct
  source 1..20: mol_type = other DNA
catacgggaacgcacatagt

SEQ ID NO: 11391 - DNA, 20 bp, synthetic construct
  source 1..20: mol_type = other DNA
acgggaacgcacatagtagg

SEQ ID NO: 11392 - DNA, 20 bp, synthetic construct
  source 1..20: mol_type = other DNA
actcttgctccgatcctggc

SEQ ID NO: 11393 - DNA, 20 bp, synthetic construct
  source 1..20: mol_type = other DNA
atagcttgttgagctcattc

SEQ ID NO: 11394 - DNA, 20 bp, synthetic construct
  source 1..20: mol_type = other DNA
cgtagcttatcatacccact

SEQ ID NO: 11395 - DNA, 20 bp, synthetic construct
  source 1..20: mol_type = other DNA
agcttatcatacccactagg

SEQ ID NO: 11396 - DNA, 20 bp, synthetic construct
  source 1..20: mol_type = other DNA
gcataatattattgtacagc

SEQ ID NO: 11397 - DNA, 20 bp, synthetic construct
  source 1..20: mol_type = other DNA
gacttgggtgcgatcagaat

SEQ ID NO: 11398 - DNA, 20 bp, synthetic construct
  source 1..20: mol_type = other DNA
aaagtgagatggcaagcgac

SEQ ID NO: 11399 - DNA, 20 bp, synthetic construct
  source 1..20: mol_type = other DNA
gcaagacatgactcgttata

SEQ ID NO: 11400 - DNA, 20 bp, synthetic construct
  source 1..20: mol_type = other DNA
tccggtgcctgtcgtagacc

SEQ ID NO: 11401 - DNA, 20 bp, synthetic construct
  source 1..20: mol_type = other DNA
tcgtagacctggctagaaag

SEQ ID NO: 11402 - DNA, 20 bp, synthetic construct
  source 1..20: mol_type = other DNA
cgtagacctggctagaaagc

SEQ ID NO: 11403 - DNA, 20 bp, synthetic construct
  source 1..20: mol_type = other DNA
gcctctacgcccgtagccat

SEQ ID NO: 11404 - DNA, 20 bp, synthetic construct
  source 1..20: mol_type = other DNA
gatgatgccatacggctcat

SEQ ID NO: 11405 - DNA, 20 bp, synthetic construct
  source 1..20: mol_type = other DNA
gtgaggctcagcggtatgca

SEQ ID NO: 11406 - DNA, 20 bp, synthetic construct
  source 1..20: mol_type = other DNA
acgacaagttgtatacgcga

SEQ ID NO: 11407 - DNA, 20 bp, synthetic construct
  source 1..20: mol_type = other DNA
ttccctcacgtacccggaaa

SEQ ID NO: 11408 - DNA, 20 bp, synthetic construct
  source 1..20: mol_type = other DNA
tggtgggacttacagtcctc

SEQ ID NO: 11409 - DNA, 20 bp, synthetic construct
  source 1..20: mol_type = other DNA
tcttgtccataccatcgggc

SEQ ID NO: 11410 - DNA, 20 bp, synthetic construct
  source 1..20: mol_type = other DNA
ccataccatcgggccggtcc

SEQ ID NO: 11411 - DNA, 20 bp, synthetic construct
  source 1..20: mol_type = other DNA
cataccatcgggccggtcca

SEQ ID NO: 11412 - DNA, 20 bp, synthetic construct
  source 1..20: mol_type = other DNA
ataccatcgggccggtccag

SEQ ID NO: 11413 - DNA, 20 bp, synthetic construct
  source 1..20: mol_type = other DNA
atctaacacgactagaccaa

SEQ ID NO: 11414 - DNA, 20 bp, synthetic construct
  source 1..20: mol_type = other DNA
tctaacacgactagaccaaa

SEQ ID NO: 11415 - DNA, 20 bp, synthetic construct
  source 1..20: mol_type = other DNA
actgctcaggcttcttgcgc

SEQ ID NO: 11416 - DNA, 20 bp, synthetic construct
  source 1..20: mol_type = other DNA
tattgtaagcagctacacgt

SEQ ID NO: 11417 - DNA, 20 bp, synthetic construct
  source 1..20: mol_type = other DNA
gtaagcagctacacgtaggt

SEQ ID NO: 11418 - DNA, 20 bp, synthetic construct
  source 1..20: mol_type = other DNA
taagcagctacacgtaggtg

SEQ ID NO: 11419 - DNA, 20 bp, synthetic construct
  source 1..20: mol_type = other DNA
gtgggcacgatgaccagggt

SEQ ID NO: 11420 - DNA, 20 bp, synthetic construct
  source 1..20: mol_type = other DNA
tgggcacgatgaccagggta

SEQ ID NO: 11421 - DNA, 20 bp, synthetic construct
  source 1..20: mol_type = other DNA
gggagggcccgcagcgacac

SEQ ID NO: 11422 - DNA, 20 bp, synthetic construct
  source 1..20: mol_type = other DNA
ggagggcccgcagcgacacg

SEQ ID NO: 11423 - DNA, 20 bp, synthetic construct
  source 1..20: mol_type = other DNA
aggcaatgcccgcgccgtaa

SEQ ID NO: 11424 - DNA, 20 bp, synthetic construct
  source 1..20: mol_type = other DNA
taacggtgagcgccttaaga

SEQ ID NO: 11425 - DNA, 20 bp, synthetic construct
  source 1..20: mol_type = other DNA
gcctccattctcgcactgga

SEQ ID NO: 11426 - DNA, 20 bp, synthetic construct
  source 1..20: mol_type = other DNA
cctccattctcgcactggac

SEQ ID NO: 11427 - DNA, 20 bp, synthetic construct
  source 1..20: mol_type = other DNA
actggacgggctatatgcag

SEQ ID NO: 11428 - DNA, 20 bp, synthetic construct
  source 1..20: mol_type = other DNA
cttaccagaggcgttacgag

SEQ ID NO: 11429 - DNA, 20 bp, synthetic construct
  source 1..20: mol_type = other DNA
ttaccagaggcgttacgaga

SEQ ID NO: 11430 - DNA, 20 bp, synthetic construct
  source 1..20: mol_type = other DNA
tagcgtcaccgaatgtgtga

SEQ ID NO: 11431 - DNA, 20 bp, synthetic construct
  source 1..20: mol_type = other DNA
aaatagtctctacggcttct

SEQ ID NO: 11432 - DNA, 20 bp, synthetic construct
  source 1..20: mol_type = other DNA
ggcggaagccctaatatacc

SEQ ID NO: 11433 - DNA, 20 bp, synthetic construct
  source 1..20: mol_type = other DNA
atagaacgctaacccagcaa

SEQ ID NO: 11434 - DNA, 20 bp, synthetic construct
  source 1..20: mol_type = other DNA
cagcatgtgtatctacccat

SEQ ID NO: 11435 - DNA, 20 bp, synthetic construct
  source 1..20: mol_type = other DNA
agcatgtgtatctacccata

SEQ ID NO: 11436 - DNA, 20 bp, synthetic construct
  source 1..20: mol_type = other DNA
catgtgtatctacccatagg

SEQ ID NO: 11437 - DNA, 20 bp, synthetic construct
  source 1..20: mol_type = other DNA
atgtgtatctacccataggg

SEQ ID NO: 11438 - DNA, 20 bp, synthetic construct
  source 1..20: mol_type = other DNA
tgaaggcccgaaggaactcc

SEQ ID NO: 11439 - DNA, 20 bp, synthetic construct
  source 1..20: mol_type = other DNA
ttagataccatcactcctcg

SEQ ID NO: 11440 - DNA, 20 bp, synthetic construct
  source 1..20: mol_type = other DNA
acaggttatctgcgaccata

SEQ ID NO: 11441 - DNA, 20 bp, synthetic construct
  source 1..20: mol_type = other DNA
taaacaggtgagaatacata

SEQ ID NO: 11442 - DNA, 20 bp, synthetic construct
  source 1..20: mol_type = other DNA
actcatcagttgttctgtaa

SEQ ID NO: 11443 - DNA, 20 bp, synthetic construct
  source 1..20: mol_type = other DNA
tgagtagtgactgtcgtgta

SEQ ID NO: 11444 - DNA, 20 bp, synthetic construct
  source 1..20: mol_type = other DNA
actgtcgtgtaaggctcagt

SEQ ID NO: 11445 - DNA, 20 bp, synthetic construct
  source 1..20: mol_type = other DNA
ctcagtcggatgagcactcg

SEQ ID NO: 11446 - DNA, 20 bp, synthetic construct
  source 1..20: mol_type = other DNA
ggatgagcactcgcggccgc

SEQ ID NO: 11447 - DNA, 20 bp, synthetic construct
  source 1..20: mol_type = other DNA
agcactcgcggccgcaggtg

SEQ ID NO: 11448 - DNA, 20 bp, synthetic construct
  source 1..20: mol_type = other DNA
atgactagtctgtccgtaac

SEQ ID NO: 11449 - DNA, 20 bp, synthetic construct
  source 1..20: mol_type = other DNA
tgactagtctgtccgtaact

SEQ ID NO: 11450 - DNA, 20 bp, synthetic construct
  source 1..20: mol_type = other DNA
gtaactgggttgtccgtgac

SEQ ID NO: 11451 - DNA, 20 bp, synthetic construct
  source 1..20: mol_type = other DNA
gttgccggtctgcccgtgac

SEQ ID NO: 11452 - DNA, 20 bp, synthetic construct
  source 1..20: mol_type = other DNA
cttgctgtagtcgctccagc

SEQ ID NO: 11453 - DNA, 20 bp, synthetic construct
  source 1..20: mol_type = other DNA
gcccattgctgatcttgata

SEQ ID NO: 11454 - DNA, 20 bp, synthetic construct
  source 1..20: mol_type = other DNA
aaacactcaccataatgccg

SEQ ID NO: 11455 - DNA, 20 bp, synthetic construct
  source 1..20: mol_type = other DNA
ccataatgccgcggataaac

SEQ ID NO: 11456 - DNA, 20 bp, synthetic construct
  source 1..20: mol_type = other DNA
agccgacctcgactccttgg

SEQ ID NO: 11457 - DNA, 20 bp, synthetic construct
  source 1..20: mol_type = other DNA
tcgaaataagacgctggacg

SEQ ID NO: 11458 - DNA, 20 bp, synthetic construct
  source 1..20: mol_type = other DNA
cgtggaggagagcgacagca

SEQ ID NO: 11459 - DNA, 20 bp, synthetic construct
  source 1..20: mol_type = other DNA
tatgcacccgctagaagcca

SEQ ID NO: 11460 - DNA, 20 bp, synthetic construct
  source 1..20: mol_type = other DNA
atgcacccgctagaagccat

SEQ ID NO: 11461 - DNA, 20 bp, synthetic construct
  source 1..20: mol_type = other DNA
aaccaacacggacgccgacc

SEQ ID NO: 11462 - DNA, 20 bp, synthetic construct
  source 1..20: mol_type = other DNA
caacacggacgccgacccgg

SEQ ID NO: 11463 - DNA, 20 bp, synthetic construct
  source 1..20: mol_type = other DNA
gtcgtgttcactagcgataa

SEQ ID NO: 11464 - DNA, 20 bp, synthetic construct
  source 1..20: mol_type = other DNA
gcagacccgtcctcggcttc

SEQ ID NO: 11465 - DNA, 20 bp, synthetic construct
  source 1..20: mol_type = other DNA
tacaaagtattcagccctct

SEQ ID NO: 11466 - DNA, 20 bp, synthetic construct
  source 1..20: mol_type = other DNA
atgtctgaagatattcgtcg

SEQ ID NO: 11467 - DNA, 20 bp, synthetic construct
  source 1..20: mol_type = other DNA
gaagatattcgtcgtggacc

SEQ ID NO: 11468 - DNA, 20 bp, synthetic construct
  source 1..20: mol_type = other DNA
atattcgtcgtggacctggc

SEQ ID NO: 11469 - DNA, 20 bp, synthetic construct
  source 1..20: mol_type = other DNA
ggagtgcacgtatcagatta

SEQ ID NO: 11470 - DNA, 20 bp, synthetic construct
  source 1..20: mol_type = other DNA
cacgtatcagattacggtct

SEQ ID NO: 11471 - DNA, 20 bp, synthetic construct
  source 1..20: mol_type = other DNA
ctcggagcccgagctcgata

SEQ ID NO: 11472 - DNA, 20 bp, synthetic construct
  source 1..20: mol_type = other DNA
cgatatggaccttatcgaaa

SEQ ID NO: 11473 - DNA, 20 bp, synthetic construct
  source 1..20: mol_type = other DNA
tcaagaactatcctctgcgc

SEQ ID NO: 11474 - DNA, 20 bp, synthetic construct
  source 1..20: mol_type = other DNA
ctcgaccattcctaagtcgc

SEQ ID NO: 11475 - DNA, 20 bp, synthetic construct
  source 1..20: mol_type = other DNA
aattgctcacatcaagtcgc

SEQ ID NO: 11476 - DNA, 20 bp, synthetic construct
  source 1..20: mol_type = other DNA
caagtcgctggcctcggcta

SEQ ID NO: 11477 - DNA, 20 bp, synthetic construct
  source 1..20: mol_type = other DNA
ctaaataatacgctgtagtc

SEQ ID NO: 11478 - DNA, 20 bp, synthetic construct
  source 1..20: mol_type = other DNA
taatacgctgtagtccggtc

SEQ ID NO: 11479 - DNA, 20 bp, synthetic construct
  source 1..20: mol_type = other DNA
aatacgctgtagtccggtca

SEQ ID NO: 11480 - DNA, 20 bp, synthetic construct
  source 1..20: mol_type = other DNA
gcccggtaagacaaagctaa

SEQ ID NO: 11481 - DNA, 20 bp, synthetic construct
  source 1..20: mol_type = other DNA
caaagctaaaggcgttcagc

SEQ ID NO: 11482 - DNA, 20 bp, synthetic construct
  source 1..20: mol_type = other DNA
gcaatgcccgcccagcgtga

SEQ ID NO: 11483 - DNA, 20 bp, synthetic construct
  source 1..20: mol_type = other DNA
cggttacgtcaatcgagtga

SEQ ID NO: 11484 - DNA, 20 bp, synthetic construct
  source 1..20: mol_type = other DNA
ggttacgtcaatcgagtgaa

SEQ ID NO: 11485 - DNA, 20 bp, synthetic construct
  source 1..20: mol_type = other DNA
aatcgagtgaagggatccct

SEQ ID NO: 11486 - DNA, 20 bp, synthetic construct
  source 1..20: mol_type = other DNA
atcgagtgaagggatccctt

SEQ ID NO: 11487 - DNA, 20 bp, synthetic construct
  source 1..20: mol_type = other DNA
tctaaagcgcatgtatgcga

SEQ ID NO: 11488 - DNA, 20 bp, synthetic construct
  source 1..20: mol_type = other DNA
gtatgcgatggacgattcat

SEQ ID NO: 11489 - DNA, 20 bp, synthetic construct
  source 1..20: mol_type = other DNA
tatgcgatggacgattcatc

SEQ ID NO: 11490 - DNA, 20 bp, synthetic construct
  source 1..20: mol_type = other DNA
atgcgatggacgattcatcg

SEQ ID NO: 11491 - DNA, 20 bp, synthetic construct
  source 1..20: mol_type = other DNA
tgcgatggacgattcatcgg

SEQ ID NO: 11492 - DNA, 20 bp, synthetic construct
  source 1..20: mol_type = other DNA
ttctgcaatgttctgacata

SEQ ID NO: 11493 - DNA, 20 bp, synthetic construct
  source 1..20: mol_type = other DNA
ctgacatatggtgagtccgg

SEQ ID NO: 11494 - DNA, 20 bp, synthetic construct
  source 1..20: mol_type = other DNA
caaacgcacattcagcccat

SEQ ID NO: 11495 - DNA, 20 bp, synthetic construct
  source 1..20: mol_type = other DNA
tagggtgccggagttcacac

SEQ ID NO: 11496 - DNA, 20 bp, synthetic construct
  source 1..20: mol_type = other DNA
cgtgataacgaataaacgga

SEQ ID NO: 11497 - DNA, 20 bp, synthetic construct
  source 1..20: mol_type = other DNA
acgaataaacggaaggacct

SEQ ID NO: 11498 - DNA, 20 bp, synthetic construct
  source 1..20: mol_type = other DNA
cgaataaacggaaggacctg

SEQ ID NO: 11499 - DNA, 20 bp, synthetic construct
  source 1..20: mol_type = other DNA
tccgacctagtgcttcaacc

SEQ ID NO: 11500 - DNA, 20 bp, synthetic construct
  source 1..20: mol_type = other DNA
taaagtagcatgcgaacaca

SEQ ID NO: 11501 - DNA, 20 bp, synthetic construct
  source 1..20: mol_type = other DNA
aaagtagcatgcgaacacat

SEQ ID NO: 11502 - DNA, 20 bp, synthetic construct
  source 1..20: mol_type = other DNA
ttaatagacccgggctatgt

SEQ ID NO: 11503 - DNA, 20 bp, synthetic construct
  source 1..20: mol_type = other DNA
ttggtgcagttggtggccca

SEQ ID NO: 11504 - DNA, 20 bp, synthetic construct
  source 1..20: mol_type = other DNA
tacataggcgtattcggtga

SEQ ID NO: 11505 - DNA, 20 bp, synthetic construct
  source 1..20: mol_type = other DNA
aagaagttgcgttaacccaa

SEQ ID NO: 11506 - DNA, 20 bp, synthetic construct
  source 1..20: mol_type = other DNA
agttgcgttaacccaatgga

SEQ ID NO: 11507 - DNA, 20 bp, synthetic construct
  source 1..20: mol_type = other DNA
cctgtcgggtatgaacgtgc

SEQ ID NO: 11508 - DNA, 20 bp, synthetic construct
  source 1..20: mol_type = other DNA
gtcgggtatgaacgtgctgg

SEQ ID NO: 11509 - DNA, 20 bp, synthetic construct
  source 1..20: mol_type = other DNA
atgaacgtgctggtggtgaa

SEQ ID NO: 11510 - DNA, 20 bp, synthetic construct
  source 1..20: mol_type = other DNA
caggccatagacaccacaac

SEQ ID NO: 11511 - DNA, 20 bp, synthetic construct
  source 1..20: mol_type = other DNA
cacaaccggcatcactaaca

SEQ ID NO: 11512 - DNA, 20 bp, synthetic construct
  source 1..20: mol_type = other DNA
gttatcgttctaatcatcgt

SEQ ID NO: 11513 - DNA, 20 bp, synthetic construct
  source 1..20: mol_type = other DNA
ttatcgttctaatcatcgta

SEQ ID NO: 11514 - DNA, 20 bp, synthetic construct
  source 1..20: mol_type = other DNA
gcattcacggcaccgccacg

SEQ ID NO: 11515 - DNA, 20 bp, synthetic construct
  source 1..20: mol_type = other DNA
ttcacggcaccgccacgagg

SEQ ID NO: 11516 - DNA, 20 bp, synthetic construct
  source 1..20: mol_type = other DNA
tgaaagaagattcgagggac

SEQ ID NO: 11517 - DNA, 20 bp, synthetic construct
  source 1..20: mol_type = other DNA
tcgagggaccggacctctat

SEQ ID NO: 11518 - DNA, 20 bp, synthetic construct
  source 1..20: mol_type = other DNA
attataccgagcttcgcagc

SEQ ID NO: 11519 - DNA, 20 bp, synthetic construct
  source 1..20: mol_type = other DNA
accgagcttcgcagcaggct

SEQ ID NO: 11520 - DNA, 20 bp, synthetic construct
  source 1..20: mol_type = other DNA
ttcacaattgacccacaaca

SEQ ID NO: 11521 - DNA, 20 bp, synthetic construct
  source 1..20: mol_type = other DNA
gtagccttcggcgaacaaat

SEQ ID NO: 11522 - DNA, 20 bp, synthetic construct
  source 1..20: mol_type = other DNA
gaacctacttagatgtgccc

SEQ ID NO: 11523 - DNA, 20 bp, synthetic construct
  source 1..20: mol_type = other DNA
tagatgtgccctggtcccgt

SEQ ID NO: 11524 - DNA, 20 bp, synthetic construct
  source 1..20: mol_type = other DNA
cgtggagcctgaacttatcg

SEQ ID NO: 11525 - DNA, 20 bp, synthetic construct
  source 1..20: mol_type = other DNA
gagcctgaacttatcgtgga

SEQ ID NO: 11526 - DNA, 20 bp, synthetic construct
  source 1..20: mol_type = other DNA
atctccagctataatgacgc

SEQ ID NO: 11527 - DNA, 20 bp, synthetic construct
  source 1..20: mol_type = other DNA
gccgccacagaatgcggaag

SEQ ID NO: 11528 - DNA, 20 bp, synthetic construct
  source 1..20: mol_type = other DNA
cattacgcgtcaccagtgtc

SEQ ID NO: 11529 - DNA, 20 bp, synthetic construct
  source 1..20: mol_type = other DNA
aataggactgcttcttcgta

SEQ ID NO: 11530 - DNA, 20 bp, synthetic construct
  source 1..20: mol_type = other DNA
aacagagatcgttcaagttc

SEQ ID NO: 11531 - DNA, 20 bp, synthetic construct
  source 1..20: mol_type = other DNA
gagatcgttcaagttctgga

SEQ ID NO: 11532 - DNA, 20 bp, synthetic construct
  source 1..20: mol_type = other DNA
aagttctggacggtcgcatt

SEQ ID NO: 11533 - DNA, 20 bp, synthetic construct
  source 1..20: mol_type = other DNA
acttcgtacccattcaccct

SEQ ID NO: 11534 - DNA, 20 bp, synthetic construct
  source 1..20: mol_type = other DNA
cttcgtacccattcaccctc

SEQ ID NO: 11535 - DNA, 20 bp, synthetic construct
  source 1..20: mol_type = other DNA
cgggccctcccttatgaaga

SEQ ID NO: 11536 - DNA, 20 bp, synthetic construct
  source 1..20: mol_type = other DNA
aaggcctgaagggtgtcggt

SEQ ID NO: 11537 - DNA, 20 bp, synthetic construct
  source 1..20: mol_type = other DNA
ttggcaaggctattgaattc

SEQ ID NO: 11538 - DNA, 20 bp, synthetic construct
  source 1..20: mol_type = other DNA
aaggctattgaattcgggag

SEQ ID NO: 11539 - DNA, 20 bp, synthetic construct
  source 1..20: mol_type = other DNA
aggctattgaattcgggagt

SEQ ID NO: 11540 - DNA, 20 bp, synthetic construct
  source 1..20: mol_type = other DNA
aatggtgaatgtggcgcgac

SEQ ID NO: 11541 - DNA, 20 bp, synthetic construct
  source 1..20: mol_type = other DNA
cacggcttatatatccaaat

SEQ ID NO: 11542 - DNA, 20 bp, synthetic construct
  source 1..20: mol_type = other DNA
ttcagaaattctcgcagagt

SEQ ID NO: 11543 - DNA, 20 bp, synthetic construct
  source 1..20: mol_type = other DNA
gcaaatccgtaaacaacaaa

SEQ ID NO: 11544 - DNA, 20 bp, synthetic construct
  source 1..20: mol_type = other DNA
aacaaataatgagcttcgtc

SEQ ID NO: 11545 - DNA, 20 bp, synthetic construct
  source 1..20: mol_type = other DNA
atatcgtggaaggctcatcg

SEQ ID NO: 11546 - DNA, 20 bp, synthetic construct
  source 1..20: mol_type = other DNA
tatcgtggaaggctcatcga

SEQ ID NO: 11547 - DNA, 20 bp, synthetic construct
  source 1..20: mol_type = other DNA
cacatacgctgcttgcagtt

SEQ ID NO: 11548 - DNA, 20 bp, synthetic construct
  source 1..20: mol_type = other DNA
gtcatgctaccaattgcctc

SEQ ID NO: 11549 - DNA, 20 bp, synthetic construct
  source 1..20: mol_type = other DNA
cgccagaaattagcttatta

SEQ ID NO: 11550 - DNA, 20 bp, synthetic construct
  source 1..20: mol_type = other DNA
gggcatcgttatcctgctgc

SEQ ID NO: 11551 - DNA, 20 bp, synthetic construct
  source 1..20: mol_type = other DNA
tatgattgatcgtcccacaa

SEQ ID NO: 11552 - DNA, 20 bp, synthetic construct
  source 1..20: mol_type = other DNA
atgattgatcgtcccacaac

SEQ ID NO: 11553 - DNA, 20 bp, synthetic construct
  source 1..20: mol_type = other DNA
gtacgtataatgataacacg

SEQ ID NO: 11554 - DNA, 20 bp, synthetic construct
  source 1..20: mol_type = other DNA
tcttctacaactgctgtctc

SEQ ID NO: 11555 - DNA, 20 bp, synthetic construct
  source 1..20: mol_type = other DNA
tattgtaatataggtaggtt

SEQ ID NO: 11556 - DNA, 20 bp, synthetic construct
  source 1..20: mol_type = other DNA
cttgtaaatcgttatacctt

SEQ ID NO: 11557 - DNA, 20 bp, synthetic construct
  source 1..20: mol_type = other DNA
tcatcccgcagcggatgatg

SEQ ID NO: 11558 - DNA, 20 bp, synthetic construct
  source 1..20: mol_type = other DNA
ggtggtgcatatgggtattc

SEQ ID NO: 11559 - DNA, 20 bp, synthetic construct
  source 1..20: mol_type = other DNA
ggcataatcatcaaatgcga

SEQ ID NO: 11560 - DNA, 20 bp, synthetic construct
  source 1..20: mol_type = other DNA
aaatcctagcttgccggtaa

SEQ ID NO: 11561 - DNA, 20 bp, synthetic construct
  source 1..20: mol_type = other DNA
ccgttaacactaagatatag

SEQ ID NO: 11562 - DNA, 20 bp, synthetic construct
  source 1..20: mol_type = other DNA
atcactgtagtaggtctata

SEQ ID NO: 11563 - DNA, 20 bp, synthetic construct
  source 1..20: mol_type = other DNA
atagctcgatataaagttat

SEQ ID NO: 11564 - DNA, 20 bp, synthetic construct
  source 1..20: mol_type = other DNA
agctcgatataaagttatag

SEQ ID NO: 11565 - DNA, 20 bp, synthetic construct
  source 1..20: mol_type = other DNA
acagtcttatctgtgctaaa

SEQ ID NO: 11566 - DNA, 20 bp, synthetic construct
  source 1..20: mol_type = other DNA
aagtgaataggactcatcgt

SEQ ID NO: 11567 - DNA, 20 bp, synthetic construct
  source 1..20: mol_type = other DNA
tactctgaaacgatatatca

SEQ ID NO: 11568 - DNA, 20 bp, synthetic construct
  source 1..20: mol_type = other DNA
gtatcactatccaatactga

SEQ ID NO: 11569 - DNA, 20 bp, synthetic construct
  source 1..20: mol_type = other DNA
cattgcaacaacataatggt

SEQ ID NO: 11570 - DNA, 20 bp, synthetic construct
  source 1..20: mol_type = other DNA
tatcctatgtgttacaatca

SEQ ID NO: 11571 - DNA, 20 bp, synthetic construct
  source 1..20: mol_type = other DNA
atgataatgatctgattagg

SEQ ID NO: 11572 - DNA, 20 bp, synthetic construct
  source 1..20: mol_type = other DNA
gaaggcccgtatacctctca

SEQ ID NO: 11573 - DNA, 20 bp, synthetic construct
  source 1..20: mol_type = other DNA
gcagcgatactggtatgcca

SEQ ID NO: 11574 - DNA, 20 bp, synthetic construct
  source 1..20: mol_type = other DNA
gatgaacattgcttgtcaac

SEQ ID NO: 11575 - DNA, 20 bp, synthetic construct
  source 1..20: mol_type = other DNA
agagtgttacagcacatatt

SEQ ID NO: 11576 - DNA, 20 bp, synthetic construct
  source 1..20: mol_type = other DNA
ctataagggagtctatgaga

SEQ ID NO: 11577 - DNA, 20 bp, synthetic construct
  source 1..20: mol_type = other DNA
ttccgcaagcaccattaaca

SEQ ID NO: 11578 - DNA, 20 bp, synthetic construct
  source 1..20: mol_type = other DNA
caccattaacaagggaacga

SEQ ID NO: 11579 - DNA, 20 bp, synthetic construct
  source 1..20: mol_type = other DNA
accattaacaagggaacgat

SEQ ID NO: 11580 - DNA, 20 bp, synthetic construct
  source 1..20: mol_type = other DNA
aaattcacgcaaatattcga

SEQ ID NO: 11581 - DNA, 20 bp, synthetic construct
  source 1..20: mol_type = other DNA
aatattcgatggccaccgct

SEQ ID NO: 11582 - DNA, 20 bp, synthetic construct
  source 1..20: mol_type = other DNA
cttatgattgcgtgaaatga

SEQ ID NO: 11583 - DNA, 20 bp, synthetic construct
  source 1..20: mol_type = other DNA
atcgaaataatgagataatc

SEQ ID NO: 11584 - DNA, 20 bp, synthetic construct
  source 1..20: mol_type = other DNA
aatcagggtatataatgggt

SEQ ID NO: 11585 - DNA, 20 bp, synthetic construct
  source 1..20: mol_type = other DNA
agaatagtcgcccaatctaa

SEQ ID NO: 11586 - DNA, 20 bp, synthetic construct
  source 1..20: mol_type = other DNA
ccttgcaagctatcgcaaat

SEQ ID NO: 11587 - DNA, 20 bp, synthetic construct
  source 1..20: mol_type = other DNA
cttgcaagctatcgcaaata

SEQ ID NO: 11588 - DNA, 20 bp, synthetic construct
  source 1..20: mol_type = other DNA
catattcaggctcgacccat

SEQ ID NO: 11589 - DNA, 20 bp, synthetic construct
  source 1..20: mol_type = other DNA
gttagttgtgaagcgttctc

SEQ ID NO: 11590 - DNA, 20 bp, synthetic construct
  source 1..20: mol_type = other DNA
tgcatcgtccgtaagcagaa

SEQ ID NO: 11591 - DNA, 20 bp, synthetic construct
  source 1..20: mol_type = other DNA
acaaggctattgagctatac

SEQ ID NO: 11592 - DNA, 20 bp, synthetic construct
  source 1..20: mol_type = other DNA
tattgtacgatatgaggaac

SEQ ID NO: 11593 - DNA, 20 bp, synthetic construct
  source 1..20: mol_type = other DNA
tctgacccgcgcagttctta

SEQ ID NO: 11594 - DNA, 20 bp, synthetic construct
  source 1..20: mol_type = other DNA
aagtcttgagagcaacaacc

SEQ ID NO: 11595 - DNA, 20 bp, synthetic construct
  source 1..20: mol_type = other DNA
ttgagagcaacaaccaggta

SEQ ID NO: 11596 - DNA, 20 bp, synthetic construct
  source 1..20: mol_type = other DNA
cttgatgggaggcagcctca

SEQ ID NO: 11597 - DNA, 20 bp, synthetic construct
  source 1..20: mol_type = other DNA
gccgcaggagcaccgtggat

SEQ ID NO: 11598 - DNA, 20 bp, synthetic construct
  source 1..20: mol_type = other DNA
gctcctccacgctcgcgatc

SEQ ID NO: 11599 - DNA, 20 bp, synthetic construct
  source 1..20: mol_type = other DNA
ccacgctcgcgatccggcgc

SEQ ID NO: 11600 - DNA, 20 bp, synthetic construct
  source 1..20: mol_type = other DNA
tcgcgatccggcgctggaag

SEQ ID NO: 11601 - DNA, 20 bp, synthetic construct
  source 1..20: mol_type = other DNA
acccttgcgctcgatgtcgt

SEQ ID NO: 11602 - DNA, 20 bp, synthetic construct
  source 1..20: mol_type = other DNA
gtcggcttcccatacctcga

SEQ ID NO: 11603 - DNA, 20 bp, synthetic construct
  source 1..20: mol_type = other DNA
aatgcacccgagaaaccagc

SEQ ID NO: 11604 - DNA, 20 bp, synthetic construct
  source 1..20: mol_type = other DNA
tatcatatattaaagtgttg

SEQ ID NO: 11605 - DNA, 20 bp, synthetic construct
  source 1..20: mol_type = other DNA
ccattaatactgagcatgcc

SEQ ID NO: 11606 - DNA, 20 bp, synthetic construct
  source 1..20: mol_type = other DNA
cattaatactgagcatgccc

SEQ ID NO: 11607 - DNA, 20 bp, synthetic construct
  source 1..20: mol_type = other DNA
gattcatggacttcaacgag

SEQ ID NO: 11608 - DNA, 20 bp, synthetic construct
  source 1..20: mol_type = other DNA
cggcggcgtaacaccagtta

SEQ ID NO: 11609 - DNA, 20 bp, synthetic construct
  source 1..20: mol_type = other DNA
cataactggtgttacgccgc

SEQ ID NO: 11610 - DNA, 20 bp, synthetic construct
  source 1..20: mol_type = other DNA
ccgggcatgctcagtattaa

SEQ ID NO: 11611 - DNA, 20 bp, synthetic construct
  source 1..20: mol_type = other DNA
tcttctggatggagcgtatt

SEQ ID NO: 11612 - DNA, 20 bp, synthetic construct
  source 1..20: mol_type = other DNA
cttctggatggagcgtatta

SEQ ID NO: 11613 - DNA, 20 bp, synthetic construct
  source 1..20: mol_type = other DNA
ggtatatgattcgctccagc

SEQ ID NO: 11614 - DNA, 20 bp, synthetic construct
  source 1..20: mol_type = other DNA
gatatatcgttcatatcaac

SEQ ID NO: 11615 - DNA, 20 bp, synthetic construct
  source 1..20: mol_type = other DNA
ttgctgcagccgtcgaggta

SEQ ID NO: 11616 - DNA, 20 bp, synthetic construct
  source 1..20: mol_type = other DNA
agccgacgacatcgagcgca

SEQ ID NO: 11617 - DNA, 20 bp, synthetic construct
  source 1..20: mol_type = other DNA
gccgacgacatcgagcgcaa

SEQ ID NO: 11618 - DNA, 20 bp, synthetic construct
  source 1..20: mol_type = other DNA
acatcgagcgcaagggtccc

SEQ ID NO: 11619 - DNA, 20 bp, synthetic construct
  source 1..20: mol_type = other DNA
catcgagcgcaagggtccct

SEQ ID NO: 11620 - DNA, 20 bp, synthetic construct
  source 1..20: mol_type = other DNA
atcggttccgcttccagcgc

SEQ ID NO: 11621 - DNA, 20 bp, synthetic construct
  source 1..20: mol_type = other DNA
ccagcgccggatcgcgagcg

SEQ ID NO: 11622 - DNA, 20 bp, synthetic construct
  source 1..20: mol_type = other DNA
gcgccggatcgcgagcgtgg

SEQ ID NO: 11623 - DNA, 20 bp, synthetic construct
  source 1..20: mol_type = other DNA
cgtggaggagctcctatcca

SEQ ID NO: 11624 - DNA, 20 bp, synthetic construct
  source 1..20: mol_type = other DNA
agcagcagtaagaagtcgtg

SEQ ID NO: 11625 - DNA, 20 bp, synthetic construct
  source 1..20: mol_type = other DNA
aagcatagcaaatccctacc

SEQ ID NO: 11626 - DNA, 20 bp, synthetic construct
  source 1..20: mol_type = other DNA
tggcatccgtaagaactgcg

SEQ ID NO: 11627 - DNA, 20 bp, synthetic construct
  source 1..20: mol_type = other DNA
ggcatccgtaagaactgcgc

SEQ ID NO: 11628 - DNA, 20 bp, synthetic construct
  source 1..20: mol_type = other DNA
aaggccagttcagcaaagtc

SEQ ID NO: 11629 - DNA, 20 bp, synthetic construct
  source 1..20: mol_type = other DNA
ctaaaggagcatgacaaata

SEQ ID NO: 11630 - DNA, 20 bp, synthetic construct
  source 1..20: mol_type = other DNA
catgacaaatatggatagct

SEQ ID NO: 11631 - DNA, 20 bp, synthetic construct
  source 1..20: mol_type = other DNA
atagctcaatagccttgttg

SEQ ID NO: 11632 - DNA, 20 bp, synthetic construct
  source 1..20: mol_type = other DNA
cagaagttacctaccaaata

SEQ ID NO: 11633 - DNA, 20 bp, synthetic construct
  source 1..20: mol_type = other DNA
gacatgctacacatggctcc

SEQ ID NO: 11634 - DNA, 20 bp, synthetic construct
  source 1..20: mol_type = other DNA
atgctacacatggctccagg

SEQ ID NO: 11635 - DNA, 20 bp, synthetic construct
  source 1..20: mol_type = other DNA
gagcgtcttaaagtatgccc

SEQ ID NO: 11636 - DNA, 20 bp, synthetic construct
  source 1..20: mol_type = other DNA
aaagtatgccctggcaaagc

SEQ ID NO: 11637 - DNA, 20 bp, synthetic construct
  source 1..20: mol_type = other DNA
tacattattcgacattccat

SEQ ID NO: 11638 - DNA, 20 bp, synthetic construct
  source 1..20: mol_type = other DNA
ggcacattcatcttatcgct

SEQ ID NO: 11639 - DNA, 20 bp, synthetic construct
  source 1..20: mol_type = other DNA
atgctgcgtactataaccga

SEQ ID NO: 11640 - DNA, 20 bp, synthetic construct
  source 1..20: mol_type = other DNA
gcacttagtgccgcaatcaa

SEQ ID NO: 11641 - DNA, 20 bp, synthetic construct
  source 1..20: mol_type = other DNA
tcagatgacggtcattgatt

SEQ ID NO: 11642 - DNA, 20 bp, synthetic construct
  source 1..20: mol_type = other DNA
agacaacatcgacatcatcg

SEQ ID NO: 11643 - DNA, 20 bp, synthetic construct
  source 1..20: mol_type = other DNA
cgacatcatcgcggcttgca

SEQ ID NO: 11644 - DNA, 20 bp, synthetic construct
  source 1..20: mol_type = other DNA
ttacacagtcgtccaagcgg

SEQ ID NO: 11645 - DNA, 20 bp, synthetic construct
  source 1..20: mol_type = other DNA
tcccatcgttcccttgttaa

SEQ ID NO: 11646 - DNA, 20 bp, synthetic construct
  source 1..20: mol_type = other DNA
gtctgatcagaaagtgaagc

SEQ ID NO: 11647 - DNA, 20 bp, synthetic construct
  source 1..20: mol_type = other DNA
ttacagtcctgcaagcatca

SEQ ID NO: 11648 - DNA, 20 bp, synthetic construct
  source 1..20: mol_type = other DNA
gttgttccatgagaggtata

SEQ ID NO: 11649 - DNA, 20 bp, synthetic construct
  source 1..20: mol_type = other DNA
gagaggtatacgggccttca

SEQ ID NO: 11650 - DNA, 20 bp, synthetic construct
  source 1..20: mol_type = other DNA
agcccaaagaccttcagtat

SEQ ID NO: 11651 - DNA, 20 bp, synthetic construct
  source 1..20: mol_type = other DNA
cagtattggatagtgatact

SEQ ID NO: 11652 - DNA, 20 bp, synthetic construct
  source 1..20: mol_type = other DNA
tggatagtgatacttggagt

SEQ ID NO: 11653 - DNA, 20 bp, synthetic construct
  source 1..20: mol_type = other DNA
taagaggacgttctccgata

SEQ ID NO: 11654 - DNA, 20 bp, synthetic construct
  source 1..20: mol_type = other DNA
tagtatatccaaggacagct

SEQ ID NO: 11655 - DNA, 20 bp, synthetic construct
  source 1..20: mol_type = other DNA
acttaacatgaaccgcattg

SEQ ID NO: 11656 - DNA, 20 bp, synthetic construct
  source 1..20: mol_type = other DNA
aacatgaaccgcattgagga

SEQ ID NO: 11657 - DNA, 20 bp, synthetic construct
  source 1..20: mol_type = other DNA
gatgacaccgattctattgt

SEQ ID NO: 11658 - DNA, 20 bp, synthetic construct
  source 1..20: mol_type = other DNA
ataattatcaagctattacg

SEQ ID NO: 11659 - DNA, 20 bp, synthetic construct
  source 1..20: mol_type = other DNA
cctctatatcttagtgttaa

SEQ ID NO: 11660 - DNA, 20 bp, synthetic construct
  source 1..20: mol_type = other DNA
atagccattaccggcaagct

SEQ ID NO: 11661 - DNA, 20 bp, synthetic construct
  source 1..20: mol_type = other DNA
ctgaatgggatgtgatctta

SEQ ID NO: 11662 - DNA, 20 bp, synthetic construct
  source 1..20: mol_type = other DNA
tgaatgggatgtgatcttaa

SEQ ID NO: 11663 - DNA, 20 bp, synthetic construct
  source 1..20: mol_type = other DNA
acagggaatgacttggtctc

SEQ ID NO: 11664 - DNA, 20 bp, synthetic construct
  source 1..20: mol_type = other DNA
aacaggtaggattaaaccac

SEQ ID NO: 11665 - DNA, 20 bp, synthetic construct
  source 1..20: mol_type = other DNA
actataccaagcaatgctgc

SEQ ID NO: 11666 - DNA, 20 bp, synthetic construct
  source 1..20: mol_type = other DNA
gacatccgcatcatccgctg

SEQ ID NO: 11667 - DNA, 20 bp, synthetic construct
  source 1..20: mol_type = other DNA
acatccgcatcatccgctgc

SEQ ID NO: 11668 - DNA, 20 bp, synthetic construct
  source 1..20: mol_type = other DNA
gaagaatattcaacccgttg

SEQ ID NO: 11669 - DNA, 20 bp, synthetic construct
  source 1..20: mol_type = other DNA
ttgtccctctgccgccttaa

SEQ ID NO: 11670 - DNA, 20 bp, synthetic construct
  source 1..20: mol_type = other DNA
ttggtgttgattgacgttga

SEQ ID NO: 11671 - DNA, 20 bp, synthetic construct
  source 1..20: mol_type = other DNA
cttgccaaccgacacccttc

SEQ ID NO: 11672 - DNA, 20 bp, synthetic construct
  source 1..20: mol_type = other DNA
caaatactccttcttcataa

SEQ ID NO: 11673 - DNA, 20 bp, synthetic construct
  source 1..20: mol_type = other DNA
atactccttcttcataaggg

SEQ ID NO: 11674 - DNA, 20 bp, synthetic construct
  source 1..20: mol_type = other DNA
tcttcataagggagggcccg

SEQ ID NO: 11675 - DNA, 20 bp, synthetic construct
  source 1..20: mol_type = other DNA
cttcataagggagggcccga

SEQ ID NO: 11676 - DNA, 20 bp, synthetic construct
  source 1..20: mol_type = other DNA
gggagggcccgagggtgaat

SEQ ID NO: 11677 - DNA, 20 bp, synthetic construct
  source 1..20: mol_type = other DNA
ttgcgctaaagcggttatta

SEQ ID NO: 11678 - DNA, 20 bp, synthetic construct
  source 1..20: mol_type = other DNA
agtaaattctgcggttaaag

SEQ ID NO: 11679 - DNA, 20 bp, synthetic construct
  source 1..20: mol_type = other DNA
tctccaatatagccggacac

SEQ ID NO: 11680 - DNA, 20 bp, synthetic construct
  source 1..20: mol_type = other DNA
accgcttccgcattctgtgg

SEQ ID NO: 11681 - DNA, 20 bp, synthetic construct
  source 1..20: mol_type = other DNA
tggaacataatgtggcttgg

SEQ ID NO: 11682 - DNA, 20 bp, synthetic construct
  source 1..20: mol_type = other DNA
atagctggagatgttgacac

SEQ ID NO: 11683 - DNA, 20 bp, synthetic construct
  source 1..20: mol_type = other DNA
cacgataagttcaggctcca

SEQ ID NO: 11684 - DNA, 20 bp, synthetic construct
  source 1..20: mol_type = other DNA
gttcaggctccacggcgcct

SEQ ID NO: 11685 - DNA, 20 bp, synthetic construct
  source 1..20: mol_type = other DNA
gtgtaacaaacgcactccta

SEQ ID NO: 11686 - DNA, 20 bp, synthetic construct
  source 1..20: mol_type = other DNA
tgtaacaaacgcactcctac

SEQ ID NO: 11687 - DNA, 20 bp, synthetic construct
  source 1..20: mol_type = other DNA
aaacgcactcctacgggacc

SEQ ID NO: 11688 - DNA, 20 bp, synthetic construct
  source 1..20: mol_type = other DNA
aacgcactcctacgggacca

SEQ ID NO: 11689 - DNA, 20 bp, synthetic construct
  source 1..20: mol_type = other DNA
cactatctgaccacaaacgg

SEQ ID NO: 11690 - DNA, 20 bp, synthetic construct
  source 1..20: mol_type = other DNA
tgtgggtcaattgtgaatac

SEQ ID NO: 11691 - DNA, 20 bp, synthetic construct
  source 1..20: mol_type = other DNA
gtgggtcaattgtgaataca

SEQ ID NO: 11692 - DNA, 20 bp, synthetic construct
  source 1..20: mol_type = other DNA
tgaatacagggaagttgatg

SEQ ID NO: 11693 - DNA, 20 bp, synthetic construct
  source 1..20: mol_type = other DNA
gaagctcggtataatcgtgt

SEQ ID NO: 11694 - DNA, 20 bp, synthetic construct
  source 1..20: mol_type = other DNA
ctagagaacctatagaggtc

SEQ ID NO: 11695 - DNA, 20 bp, synthetic construct
  source 1..20: mol_type = other DNA
cgtgttagtgatgccggttg

SEQ ID NO: 11696 - DNA, 20 bp, synthetic construct
  source 1..20: mol_type = other DNA
gatgccggttgtggtgtcta

SEQ ID NO: 11697 - DNA, 20 bp, synthetic construct
  source 1..20: mol_type = other DNA
ccagcacgttcatacccgac

SEQ ID NO: 11698 - DNA, 20 bp, synthetic construct
  source 1..20: mol_type = other DNA
cagcacgttcatacccgaca

SEQ ID NO: 11699 - DNA, 20 bp, synthetic construct
  source 1..20: mol_type = other DNA
atgtcctgcgtccatccatt

SEQ ID NO: 11700 - DNA, 20 bp, synthetic construct
  source 1..20: mol_type = other DNA
attgggttaacgcaacttct

SEQ ID NO: 11701 - DNA, 20 bp, synthetic construct
  source 1..20: mol_type = other DNA
caaatctaccctcgcctctt

SEQ ID NO: 11702 - DNA, 20 bp, synthetic construct
  source 1..20: mol_type = other DNA
gcgcaaacagcggaaatatt

SEQ ID NO: 11703 - DNA, 20 bp, synthetic construct
  source 1..20: mol_type = other DNA
ggtcaggcacatggtcacct

SEQ ID NO: 11704 - DNA, 20 bp, synthetic construct
  source 1..20: mol_type = other DNA
atgagctcgcccacatagcc

SEQ ID NO: 11705 - DNA, 20 bp, synthetic construct
  source 1..20: mol_type = other DNA
tgagctcgcccacatagccc

SEQ ID NO: 11706 - DNA, 20 bp, synthetic construct
  source 1..20: mol_type = other DNA
caaggatgagcagccgttca

SEQ ID NO: 11707 - DNA, 20 bp, synthetic construct
  source 1..20: mol_type = other DNA
aaggatgagcagccgttcat

SEQ ID NO: 11708 - DNA, 20 bp, synthetic construct
  source 1..20: mol_type = other DNA
ttagtccaggttgaagcact

SEQ ID NO: 11709 - DNA, 20 bp, synthetic construct
  source 1..20: mol_type = other DNA
ttattcgttatcacggaagg

SEQ ID NO: 11710 - DNA, 20 bp, synthetic construct
  source 1..20: mol_type = other DNA
tattcgttatcacggaaggt

SEQ ID NO: 11711 - DNA, 20 bp, synthetic construct
  source 1..20: mol_type = other DNA
tacaaatcaacaaacggcgg

SEQ ID NO: 11712 - DNA, 20 bp, synthetic construct
  source 1..20: mol_type = other DNA
gcggaggatgacaatattat

SEQ ID NO: 11713 - DNA, 20 bp, synthetic construct
  source 1..20: mol_type = other DNA
cggaggatgacaatattatt

SEQ ID NO: 11714 - DNA, 20 bp, synthetic construct
  source 1..20: mol_type = other DNA
tgggagcatatgcgataaac

SEQ ID NO: 11715 - DNA, 20 bp, synthetic construct
  source 1..20: mol_type = other DNA
gggagcatatgcgataaaca

SEQ ID NO: 11716 - DNA, 20 bp, synthetic construct
  source 1..20: mol_type = other DNA
gtgtgaactccggcacccta

SEQ ID NO: 11717 - DNA, 20 bp, synthetic construct
  source 1..20: mol_type = other DNA
tgtgaactccggcaccctat

SEQ ID NO: 11718 - DNA, 20 bp, synthetic construct
  source 1..20: mol_type = other DNA
cattgcagaatacggaggct

SEQ ID NO: 11719 - DNA, 20 bp, synthetic construct
  source 1..20: mol_type = other DNA
gttgtctataactattgtgt

SEQ ID NO: 11720 - DNA, 20 bp, synthetic construct
  source 1..20: mol_type = other DNA
gtgttaaacaacatggctaa

SEQ ID NO: 11721 - DNA, 20 bp, synthetic construct
  source 1..20: mol_type = other DNA
tcttaccgggcgtaaatgat

SEQ ID NO: 11722 - DNA, 20 bp, synthetic construct
  source 1..20: mol_type = other DNA
cttaccgggcgtaaatgata

SEQ ID NO: 11723 - DNA, 20 bp, synthetic construct
  source 1..20: mol_type = other DNA
cgtaaatgatagggcaacgg

SEQ ID NO: 11724 - DNA, 20 bp, synthetic construct
  source 1..20: mol_type = other DNA
aactgtgacgcaaccctgac

SEQ ID NO: 11725 - DNA, 20 bp, synthetic construct
  source 1..20: mol_type = other DNA
cttgtcggtgaccatagccg

SEQ ID NO: 11726 - DNA, 20 bp, synthetic construct
  source 1..20: mol_type = other DNA
ctgcgacttaggaatggtcg

SEQ ID NO: 11727 - DNA, 20 bp, synthetic construct
  source 1..20: mol_type = other DNA
acttaggaatggtcgaggtc

SEQ ID NO: 11728 - DNA, 20 bp, synthetic construct
  source 1..20: mol_type = other DNA
cgaggtcaggttgatcttgt

SEQ ID NO: 11729 - DNA, 20 bp, synthetic construct
  source 1..20: mol_type = other DNA
gataaggtccatatcgagct

SEQ ID NO: 11730 - DNA, 20 bp, synthetic construct
  source 1..20: mol_type = other DNA
ataaggtccatatcgagctc

SEQ ID NO: 11731 - DNA, 20 bp, synthetic construct
  source 1..20: mol_type = other DNA
cttgtcatagcggtgaacga

SEQ ID NO: 11732 - DNA, 20 bp, synthetic construct
  source 1..20: mol_type = other DNA
taacaaagcttgcttgcgac

SEQ ID NO: 11733 - DNA, 20 bp, synthetic construct
  source 1..20: mol_type = other DNA
aatgcccttgcgctcaaagt

SEQ ID NO: 11734 - DNA, 20 bp, synthetic construct
  source 1..20: mol_type = other DNA
atgcccttgcgctcaaagtt

SEQ ID NO: 11735 - DNA, 20 bp, synthetic construct
  source 1..20: mol_type = other DNA
agattagagcagataacttg

SEQ ID NO: 11736 - DNA, 20 bp, synthetic construct
  source 1..20: mol_type = other DNA
gattagagcagataacttgg

SEQ ID NO: 11737 - DNA, 20 bp, synthetic construct
  source 1..20: mol_type = other DNA
agagggatcttgtggcctag

SEQ ID NO: 11738 - DNA, 20 bp, synthetic construct
  source 1..20: mol_type = other DNA
gagggatcttgtggcctaga

SEQ ID NO: 11739 - DNA, 20 bp, synthetic construct
  source 1..20: mol_type = other DNA
agtgaacacgacatccatcc

SEQ ID NO: 11740 - DNA, 20 bp, synthetic construct
  source 1..20: mol_type = other DNA
gtgaacacgacatccatccc

SEQ ID NO: 11741 - DNA, 20 bp, synthetic construct
  source 1..20: mol_type = other DNA
atccatcccgggcgccaact

SEQ ID NO: 11742 - DNA, 20 bp, synthetic construct
  source 1..20: mol_type = other DNA
catcccgggcgccaacttgg

SEQ ID NO: 11743 - DNA, 20 bp, synthetic construct
  source 1..20: mol_type = other DNA
ctccgggtcggcgtccgtgt

SEQ ID NO: 11744 - DNA, 20 bp, synthetic construct
  source 1..20: mol_type = other DNA
tggcttctagcgggtgcata

SEQ ID NO: 11745 - DNA, 20 bp, synthetic construct
  source 1..20: mol_type = other DNA
ggcttctagcgggtgcataa

SEQ ID NO: 11746 - DNA, 20 bp, synthetic construct
  source 1..20: mol_type = other DNA
cataagggaaaggttgtgtc

SEQ ID NO: 11747 - DNA, 20 bp, synthetic construct
  source 1..20: mol_type = other DNA
tcgggccgttcgttcgatga

SEQ ID NO: 11748 - DNA, 20 bp, synthetic construct
  source 1..20: mol_type = other DNA
gttctgctgagcttgccgtt

SEQ ID NO: 11749 - DNA, 20 bp, synthetic construct
  source 1..20: mol_type = other DNA
ttctgctgagcttgccgttc

SEQ ID NO: 11750 - DNA, 20 bp, synthetic construct
  source 1..20: mol_type = other DNA
ggatgtccgccaaggagtcg

SEQ ID NO: 11751 - DNA, 20 bp, synthetic construct
  source 1..20: mol_type = other DNA
gtccgccaaggagtcgaggt

SEQ ID NO: 11752 - DNA, 20 bp, synthetic construct
  source 1..20: mol_type = other DNA
tactattctcattgctatcg

SEQ ID NO: 11753 - DNA, 20 bp, synthetic construct
  source 1..20: mol_type = other DNA
gcagaagtcactccacaacc

SEQ ID NO: 11754 - DNA, 20 bp, synthetic construct
  source 1..20: mol_type = other DNA
acaaccaggtacctctaaac

SEQ ID NO: 11755 - DNA, 20 bp, synthetic construct
  source 1..20: mol_type = other DNA
ccaggtacctctaaaccggc

SEQ ID NO: 11756 - DNA, 20 bp, synthetic construct
  source 1..20: mol_type = other DNA
agtgcaggcaaaccagtcac

SEQ ID NO: 11757 - DNA, 20 bp, synthetic construct
  source 1..20: mol_type = other DNA
caaaccagtcacgggcagac

SEQ ID NO: 11758 - DNA, 20 bp, synthetic construct
  source 1..20: mol_type = other DNA
agtcacggacaacccagtta

SEQ ID NO: 11759 - DNA, 20 bp, synthetic construct
  source 1..20: mol_type = other DNA
agttacggacagactagtca

SEQ ID NO: 11760 - DNA, 20 bp, synthetic construct
  source 1..20: mol_type = other DNA
agactagtcatggcaactgg

SEQ ID NO: 11761 - DNA, 20 bp, synthetic construct
  source 1..20: mol_type = other DNA
gactagtcatggcaactggc

SEQ ID NO: 11762 - DNA, 20 bp, synthetic construct
  source 1..20: mol_type = other DNA
catggcaactggcgggccag

SEQ ID NO: 11763 - DNA, 20 bp, synthetic construct
  source 1..20: mol_type = other DNA
gaatccgcaggcccaagagg

SEQ ID NO: 11764 - DNA, 20 bp, synthetic construct
  source 1..20: mol_type = other DNA
catcaaagatgggctctcga

SEQ ID NO: 11765 - DNA, 20 bp, synthetic construct
  source 1..20: mol_type = other DNA
caaagatgggctctcgaagg

SEQ ID NO: 11766 - DNA, 20 bp, synthetic construct
  source 1..20: mol_type = other DNA
taccattctaagcatcctta

SEQ ID NO: 11767 - DNA, 20 bp, synthetic construct
  source 1..20: mol_type = other DNA
atggtcgcagataacctgta

SEQ ID NO: 11768 - DNA, 20 bp, synthetic construct
  source 1..20: mol_type = other DNA
ggtcgcagataacctgtacg

SEQ ID NO: 11769 - DNA, 20 bp, synthetic construct
  source 1..20: mol_type = other DNA
aaagaagaagagtagctcgg

SEQ ID NO: 11770 - DNA, 20 bp, synthetic construct
  source 1..20: mol_type = other DNA
atatagcccgggagttcctt

SEQ ID NO: 11771 - DNA, 20 bp, synthetic construct
  source 1..20: mol_type = other DNA
tatagcccgggagttccttc

SEQ ID NO: 11772 - DNA, 20 bp, synthetic construct
  source 1..20: mol_type = other DNA
agttccttcgggccttcaac

SEQ ID NO: 11773 - DNA, 20 bp, synthetic construct
  source 1..20: mol_type = other DNA
tctatacatggcatgaattc

SEQ ID NO: 11774 - DNA, 20 bp, synthetic construct
  source 1..20: mol_type = other DNA
gcatgaattccgggtatatt

SEQ ID NO: 11775 - DNA, 20 bp, synthetic construct
  source 1..20: mol_type = other DNA
catgaattccgggtatatta

SEQ ID NO: 11776 - DNA, 20 bp, synthetic construct
  source 1..20: mol_type = other DNA
gctcactcacttctgagtgc

SEQ ID NO: 11777 - DNA, 20 bp, synthetic construct
  source 1..20: mol_type = other DNA
atggcatcgtataccgcaac

SEQ ID NO: 11778 - DNA, 20 bp, synthetic construct
  source 1..20: mol_type = other DNA
cgccaatgccttcacacatt

SEQ ID NO: 11779 - DNA, 20 bp, synthetic construct
  source 1..20: mol_type = other DNA
ttcacacattcggtgacgct

SEQ ID NO: 11780 - DNA, 20 bp, synthetic construct
  source 1..20: mol_type = other DNA
tcacacattcggtgacgcta

SEQ ID NO: 11781 - DNA, 20 bp, synthetic construct
  source 1..20: mol_type = other DNA
cacacattcggtgacgctag

SEQ ID NO: 11782 - DNA, 20 bp, synthetic construct
  source 1..20: mol_type = other DNA
acacattcggtgacgctagg

SEQ ID NO: 11783 - DNA, 20 bp, synthetic construct
  source 1..20: mol_type = other DNA
gctgctccgataatgacatg

SEQ ID NO: 11784 - DNA, 20 bp, synthetic construct
  source 1..20: mol_type = other DNA
ccgcagcaaatggcgacgca

SEQ ID NO: 11785 - DNA, 20 bp, synthetic construct
  source 1..20: mol_type = other DNA
cagcaaatggcgacgcacgg

SEQ ID NO: 11786 - DNA, 20 bp, synthetic construct
  source 1..20: mol_type = other DNA
tagcccgtccagtgcgagaa

SEQ ID NO: 11787 - DNA, 20 bp, synthetic construct
  source 1..20: mol_type = other DNA
cccgtccagtgcgagaatgg

SEQ ID NO: 11788 - DNA, 20 bp, synthetic construct
  source 1..20: mol_type = other DNA
tcttaaggcgctcaccgtta

SEQ ID NO: 11789 - DNA, 20 bp, synthetic construct
  source 1..20: mol_type = other DNA
aggcgctcaccgttacggcg

SEQ ID NO: 11790 - DNA, 20 bp, synthetic construct
  source 1..20: mol_type = other DNA
ggcgctcaccgttacggcgc

SEQ ID NO: 11791 - DNA, 20 bp, synthetic construct
  source 1..20: mol_type = other DNA
gttacggcgcgggcattgcc

SEQ ID NO: 11792 - DNA, 20 bp, synthetic construct
  source 1..20: mol_type = other DNA
ttacggcgcgggcattgcct

SEQ ID NO: 11793 - DNA, 20 bp, synthetic construct
  source 1..20: mol_type = other DNA
aaagcacatagccataagac

SEQ ID NO: 11794 - DNA, 20 bp, synthetic construct
  source 1..20: mol_type = other DNA
ggaaactgccttcacgctgc

SEQ ID NO: 11795 - DNA, 20 bp, synthetic construct
  source 1..20: mol_type = other DNA
gaaactgccttcacgctgca

SEQ ID NO: 11796 - DNA, 20 bp, synthetic construct
  source 1..20: mol_type = other DNA
cctacatctaaataccggtt

SEQ ID NO: 11797 - DNA, 20 bp, synthetic construct
  source 1..20: mol_type = other DNA
caaagagtacgacgtcatcg

SEQ ID NO: 11798 - DNA, 20 bp, synthetic construct
  source 1..20: mol_type = other DNA
aaagagtacgacgtcatcgt

SEQ ID NO: 11799 - DNA, 20 bp, synthetic construct
  source 1..20: mol_type = other DNA
tggtctagtcgtgttagatg

SEQ ID NO: 11800 - DNA, 20 bp, synthetic construct
  source 1..20: mol_type = other DNA
ggcacatgaattacactcgc

SEQ ID NO: 11801 - DNA, 20 bp, synthetic construct
  source 1..20: mol_type = other DNA
atacaacttagtcggatatt

SEQ ID NO: 11802 - DNA, 20 bp, synthetic construct
  source 1..20: mol_type = other DNA
cctggaccggcccgatggta

SEQ ID NO: 11803 - DNA, 20 bp, synthetic construct
  source 1..20: mol_type = other DNA
cgtgagggaaatcgaatatc

SEQ ID NO: 11804 - DNA, 20 bp, synthetic construct
  source 1..20: mol_type = other DNA
tatacaacttgtcgtaaatg

SEQ ID NO: 11805 - DNA, 20 bp, synthetic construct
  source 1..20: mol_type = other DNA
taccgctgagcctcacaaat

SEQ ID NO: 11806 - DNA, 20 bp, synthetic construct
  source 1..20: mol_type = other DNA
accgctgagcctcacaaatg

SEQ ID NO: 11807 - DNA, 20 bp, synthetic construct
  source 1..20: mol_type = other DNA
ccgctgagcctcacaaatgg

SEQ ID NO: 11808 - DNA, 20 bp, synthetic construct
  source 1..20: mol_type = other DNA
tgttcaaattgtcgttccgg

SEQ ID NO: 11809 - DNA, 20 bp, synthetic construct
  source 1..20: mol_type = other DNA
gaggtggcgctcctatgcgg

SEQ ID NO: 11810 - DNA, 20 bp, synthetic construct
  source 1..20: mol_type = other DNA
aggtggcgctcctatgcggc

SEQ ID NO: 11811 - DNA, 20 bp, synthetic construct
  source 1..20: mol_type = other DNA
tccattatcttgctgaccta

SEQ ID NO: 11812 - DNA, 20 bp, synthetic construct
  source 1..20: mol_type = other DNA
acctatggctacgggcgtag

SEQ ID NO: 11813 - DNA, 20 bp, synthetic construct
  source 1..20: mol_type = other DNA
gcatatgacatcgatcatca

SEQ ID NO: 11814 - DNA, 20 bp, synthetic construct
  source 1..20: mol_type = other DNA
cttgggacgtattacccggc

SEQ ID NO: 11815 - DNA, 20 bp, synthetic construct
  source 1..20: mol_type = other DNA
ttgggacgtattacccggca

SEQ ID NO: 11816 - DNA, 20 bp, synthetic construct
  source 1..20: mol_type = other DNA
acgtattacccggcagggat

SEQ ID NO: 11817 - DNA, 20 bp, synthetic construct
  source 1..20: mol_type = other DNA
gccaggtctacgacaggcac

SEQ ID NO: 11818 - DNA, 20 bp, synthetic construct
  source 1..20: mol_type = other DNA
ctcctcatctatcaccagat

SEQ ID NO: 11819 - DNA, 20 bp, synthetic construct
  source 1..20: mol_type = other DNA
atctatcaccagatgggcat

SEQ ID NO: 11820 - DNA, 20 bp, synthetic construct
  source 1..20: mol_type = other DNA
gtccctagacgcttacaaca

SEQ ID NO: 11821 - DNA, 20 bp, synthetic construct
  source 1..20: mol_type = other DNA
tccctagacgcttacaacat

SEQ ID NO: 11822 - DNA, 20 bp, synthetic construct
  source 1..20: mol_type = other DNA
ccctagacgcttacaacatg

SEQ ID NO: 11823 - DNA, 20 bp, synthetic construct
  source 1..20: mol_type = other DNA
cagcagatcataaaggcggg

SEQ ID NO: 11824 - DNA, 20 bp, synthetic construct
  source 1..20: mol_type = other DNA
ttgcctgctcatcgttgacg

SEQ ID NO: 11825 - DNA, 20 bp, synthetic construct
  source 1..20: mol_type = other DNA
caaactactaaaccgcctag

SEQ ID NO: 11826 - DNA, 20 bp, synthetic construct
  source 1..20: mol_type = other DNA
aaactactaaaccgcctagt

SEQ ID NO: 11827 - DNA, 20 bp, synthetic construct
  source 1..20: mol_type = other DNA
gtgggtatgataagctacgc

SEQ ID NO: 11828 - DNA, 20 bp, synthetic construct
  source 1..20: mol_type = other DNA
aaatgtcacccgagcagtat

SEQ ID NO: 11829 - DNA, 20 bp, synthetic construct
  source 1..20: mol_type = other DNA
gcagtataggcaatatctgc

SEQ ID NO: 11830 - DNA, 20 bp, synthetic construct
  source 1..20: mol_type = other DNA
gtccgaaatgctaacagtaa

SEQ ID NO: 11831 - DNA, 20 bp, synthetic construct
  source 1..20: mol_type = other DNA
ggaattgggccttcacgtcg

SEQ ID NO: 11832 - DNA, 20 bp, synthetic construct
  source 1..20: mol_type = other DNA
agagcgcgacatgatccagc

SEQ ID NO: 11833 - DNA, 20 bp, synthetic construct
  source 1..20: mol_type = other DNA
aattcgccgctgaatataca

SEQ ID NO: 11834 - DNA, 20 bp, synthetic construct
  source 1..20: mol_type = other DNA
gccgctgaatatacacggag

SEQ ID NO: 11835 - DNA, 20 bp, synthetic construct
  source 1..20: mol_type = other DNA
gagggattggatctcaaata

SEQ ID NO: 11836 - DNA, 20 bp, synthetic construct
  source 1..20: mol_type = other DNA
gattggatctcaaatacggg

SEQ ID NO: 11837 - DNA, 20 bp, synthetic construct
  source 1..20: mol_type = other DNA
ggatctcaaatacgggcggc

SEQ ID NO: 11838 - DNA, 20 bp, synthetic construct
  source 1..20: mol_type = other DNA
ttcatatcctagagccgtac

SEQ ID NO: 11839 - DNA, 20 bp, synthetic construct
  source 1..20: mol_type = other DNA
tcatatcctagagccgtact

SEQ ID NO: 11840 - DNA, 20 bp, synthetic construct
  source 1..20: mol_type = other DNA
cctagagccgtactgggata

SEQ ID NO: 11841 - DNA, 20 bp, synthetic construct
  source 1..20: mol_type = other DNA
gtactgggataaggcccgag

SEQ ID NO: 11842 - DNA, 20 bp, synthetic construct
  source 1..20: mol_type = other DNA
aaggcgcgcattatacgcat

SEQ ID NO: 11843 - DNA, 20 bp, synthetic construct
  source 1..20: mol_type = other DNA
ccacgatgcgctaccgcccg

SEQ ID NO: 11844 - DNA, 20 bp, synthetic construct
  source 1..20: mol_type = other DNA
gccattgaatgtgccttcaa

SEQ ID NO: 11845 - DNA, 20 bp, synthetic construct
  source 1..20: mol_type = other DNA
tgtgccttcaacggcgaaag

SEQ ID NO: 11846 - DNA, 20 bp, synthetic construct
  source 1..20: mol_type = other DNA
agcctatagcatatcctacg

SEQ ID NO: 11847 - DNA, 20 bp, synthetic construct
  source 1..20: mol_type = other DNA
gcctatagcatatcctacga

SEQ ID NO: 11848 - DNA, 20 bp, synthetic construct
  source 1..20: mol_type = other DNA
cgaatataatcccatcatta

SEQ ID NO: 11849 - DNA, 20 bp, synthetic construct
  source 1..20: mol_type = other DNA
atcattaaggtcattgactt

SEQ ID NO: 11850 - DNA, 20 bp, synthetic construct
  source 1..20: mol_type = other DNA
aactgtgtggacgataggta

SEQ ID NO: 11851 - DNA, 20 bp, synthetic construct
  source 1..20: mol_type = other DNA
gtggacgataggtatggtcg

SEQ ID NO: 11852 - DNA, 20 bp, synthetic construct
  source 1..20: mol_type = other DNA
aaacacggtcacccgttgtt

SEQ ID NO: 11853 - DNA, 20 bp, synthetic construct
  source 1..20: mol_type = other DNA
ggtcacccgttgttaggttg

SEQ ID NO: 11854 - DNA, 20 bp, synthetic construct
  source 1..20: mol_type = other DNA
gattggagaggctatccaca

SEQ ID NO: 11855 - DNA, 20 bp, synthetic construct
  source 1..20: mol_type = other DNA
tggaccgaaagagtatctaa

SEQ ID NO: 11856 - DNA, 20 bp, synthetic construct
  source 1..20: mol_type = other DNA
ggaccgaaagagtatctaat

SEQ ID NO: 11857 - DNA, 20 bp, synthetic construct
  source 1..20: mol_type = other DNA
tcacaggaagaagctctact

SEQ ID NO: 11858 - DNA, 20 bp, synthetic construct
  source 1..20: mol_type = other DNA
ggaagaagctctacttggtt

SEQ ID NO: 11859 - DNA, 20 bp, synthetic construct
  source 1..20: mol_type = other DNA
gaacaaccttgaactcgaag

SEQ ID NO: 11860 - DNA, 20 bp, synthetic construct
  source 1..20: mol_type = other DNA
ctcggcagtgccgtgaaggt

SEQ ID NO: 11861 - DNA, 20 bp, synthetic construct
  source 1..20: mol_type = other DNA
gtcgggccacagtatcttaa

SEQ ID NO: 11862 - DNA, 20 bp, synthetic construct
  source 1..20: mol_type = other DNA
tcgggccacagtatcttaac

SEQ ID NO: 11863 - DNA, 20 bp, synthetic construct
  source 1..20: mol_type = other DNA
caatacttagacgcaccata

SEQ ID NO: 11864 - DNA, 20 bp, synthetic construct
  source 1..20: mol_type = other DNA
taggacgatgcagcccatcc

SEQ ID NO: 11865 - DNA, 20 bp, synthetic construct
  source 1..20: mol_type = other DNA
ggcgtgcatccaccgccaca

SEQ ID NO: 11866 - DNA, 20 bp, synthetic construct
  source 1..20: mol_type = other DNA
taggtatgagattgttccat

SEQ ID NO: 11867 - DNA, 20 bp, synthetic construct
  source 1..20: mol_type = other DNA
aggtatgagattgttccatc

SEQ ID NO: 11868 - DNA, 20 bp, synthetic construct
  source 1..20: mol_type = other DNA
tatgagattgttccatcggg

SEQ ID NO: 11869 - DNA, 20 bp, synthetic construct
  source 1..20: mol_type = other DNA
attgttccatcgggagggat

SEQ ID NO: 11870 - DNA, 20 bp, synthetic construct
  source 1..20: mol_type = other DNA
ttgttccatcgggagggata

SEQ ID NO: 11871 - DNA, 20 bp, synthetic construct
  source 1..20: mol_type = other DNA
tatctccttgatgccgcaac

SEQ ID NO: 11872 - DNA, 20 bp, synthetic construct
  source 1..20: mol_type = other DNA
atctccttgatgccgcaact

SEQ ID NO: 11873 - DNA, 20 bp, synthetic construct
  source 1..20: mol_type = other DNA
cttgatgccgcaactgggaa

SEQ ID NO: 11874 - DNA, 20 bp, synthetic construct
  source 1..20: mol_type = other DNA
acattcgatgttaagcgccc

SEQ ID NO: 11875 - DNA, 20 bp, synthetic construct
  source 1..20: mol_type = other DNA
atgcgatgttgagaccacaa

SEQ ID NO: 11876 - DNA, 20 bp, synthetic construct
  source 1..20: mol_type = other DNA
tatatcaagcccgtgttgtt

SEQ ID NO: 11877 - DNA, 20 bp, synthetic construct
  source 1..20: mol_type = other DNA
tcaagatgcgccagcgagaa

SEQ ID NO: 11878 - DNA, 20 bp, synthetic construct
  source 1..20: mol_type = other DNA
caagatgcgccagcgagaac

SEQ ID NO: 11879 - DNA, 20 bp, synthetic construct
  source 1..20: mol_type = other DNA
gcgagaacgggctcgctatg

SEQ ID NO: 11880 - DNA, 20 bp, synthetic construct
  source 1..20: mol_type = other DNA
ttcaggcgccagccactggt

SEQ ID NO: 11881 - DNA, 20 bp, synthetic construct
  source 1..20: mol_type = other DNA
tcaggcgccagccactggta

SEQ ID NO: 11882 - DNA, 20 bp, synthetic construct
  source 1..20: mol_type = other DNA
gcctggtggcgatcatgtcg

SEQ ID NO: 11883 - DNA, 20 bp, synthetic construct
  source 1..20: mol_type = other DNA
gtcgcggtaatacttgatga

SEQ ID NO: 11884 - DNA, 20 bp, synthetic construct
  source 1..20: mol_type = other DNA
gatgatggttctaaactggt

SEQ ID NO: 11885 - DNA, 20 bp, synthetic construct
  source 1..20: mol_type = other DNA
ctaaactggtaggaaatgcg

SEQ ID NO: 11886 - DNA, 20 bp, synthetic construct
  source 1..20: mol_type = other DNA
aatgcgtggtgatatgttct

SEQ ID NO: 11887 - DNA, 20 bp, synthetic construct
  source 1..20: mol_type = other DNA
taatctggctcaccgaggat

SEQ ID NO: 11888 - DNA, 20 bp, synthetic construct
  source 1..20: mol_type = other DNA
aggtcttctacgtcgatgtc

SEQ ID NO: 11889 - DNA, 20 bp, synthetic construct
  source 1..20: mol_type = other DNA
gtcgatgtctggaatcgaga

SEQ ID NO: 11890 - DNA, 20 bp, synthetic construct
  source 1..20: mol_type = other DNA
agatggcattgtacactcct

SEQ ID NO: 11891 - DNA, 20 bp, synthetic construct
  source 1..20: mol_type = other DNA
taggtcctcgaagttgggaa

SEQ ID NO: 11892 - DNA, 20 bp, synthetic construct
  source 1..20: mol_type = other DNA
aggtcctcgaagttgggaat

SEQ ID NO: 11893 - DNA, 20 bp, synthetic construct
  source 1..20: mol_type = other DNA
ggtcctcgaagttgggaatg

SEQ ID NO: 11894 - DNA, 20 bp, synthetic construct
  source 1..20: mol_type = other DNA
gtcctcgaagttgggaatgg

SEQ ID NO: 11895 - DNA, 20 bp, synthetic construct
  source 1..20: mol_type = other DNA
tactgttctaattcgtcttc

SEQ ID NO: 11896 - DNA, 20 bp, synthetic construct
  source 1..20: mol_type = other DNA
aaaggtgtactcattatgcg

SEQ ID NO: 11897 - DNA, 20 bp, synthetic construct
  source 1..20: mol_type = other DNA
aaggtgtactcattatgcgc

SEQ ID NO: 11898 - DNA, 20 bp, synthetic construct
  source 1..20: mol_type = other DNA
tacggacctatcatactcat

SEQ ID NO: 11899 - DNA, 20 bp, synthetic construct
  source 1..20: mol_type = other DNA
acctatcatactcatcggca

SEQ ID NO: 11900 - DNA, 20 bp, synthetic construct
  source 1..20: mol_type = other DNA
atcatactcatcggcatgga

SEQ ID NO: 11901 - DNA, 20 bp, synthetic construct
  source 1..20: mol_type = other DNA
aatgtggtgataccaatagg

SEQ ID NO: 11902 - DNA, 20 bp, synthetic construct
  source 1..20: mol_type = other DNA
atgtggtgataccaataggt

SEQ ID NO: 11903 - DNA, 20 bp, synthetic construct
  source 1..20: mol_type = other DNA
tatggctgatcatcattccc

SEQ ID NO: 11904 - DNA, 20 bp, synthetic construct
  source 1..20: mol_type = other DNA
gggctgttgatacggcatca

SEQ ID NO: 11905 - DNA, 20 bp, synthetic construct
  source 1..20: mol_type = other DNA
ggctgttgatacggcatcat

SEQ ID NO: 11906 - DNA, 20 bp, synthetic construct
  source 1..20: mol_type = other DNA
catcatgggctgttcgtccg

SEQ ID NO: 11907 - DNA, 20 bp, synthetic construct
  source 1..20: mol_type = other DNA
tcgtccgaggattgttgata

SEQ ID NO: 11908 - DNA, 20 bp, synthetic construct
  source 1..20: mol_type = other DNA
attgttgatacggcaataat

SEQ ID NO: 11909 - DNA, 20 bp, synthetic construct
  source 1..20: mol_type = other DNA
atacggcaataatgggtgca

SEQ ID NO: 11910 - DNA, 20 bp, synthetic construct
  source 1..20: mol_type = other DNA
tacggcaataatgggtgcat

SEQ ID NO: 11911 - DNA, 20 bp, synthetic construct
  source 1..20: mol_type = other DNA
tgcatgggctgctcacgcgg

SEQ ID NO: 11912 - DNA, 20 bp, synthetic construct
  source 1..20: mol_type = other DNA
ctgctgcggcgtaatgagaa

SEQ ID NO: 11913 - DNA, 20 bp, synthetic construct
  source 1..20: mol_type = other DNA
actgctggttaaacgccgca

SEQ ID NO: 11914 - DNA, 20 bp, synthetic construct
  source 1..20: mol_type = other DNA
tacaaaccgtagcacatcta

SEQ ID NO: 11915 - DNA, 20 bp, synthetic construct
  source 1..20: mol_type = other DNA
taagggcattagcagagccg

SEQ ID NO: 11916 - DNA, 20 bp, synthetic construct
  source 1..20: mol_type = other DNA
attagcagagccgcggtgca

SEQ ID NO: 11917 - DNA, 20 bp, synthetic construct
  source 1..20: mol_type = other DNA
ccgcggtgcacggcctgtcg

SEQ ID NO: 11918 - DNA, 20 bp, synthetic construct
  source 1..20: mol_type = other DNA
cgcggtgcacggcctgtcgc

SEQ ID NO: 11919 - DNA, 20 bp, synthetic construct
  source 1..20: mol_type = other DNA
tgctagatattaagcccggt

SEQ ID NO: 11920 - DNA, 20 bp, synthetic construct
  source 1..20: mol_type = other DNA
gcccggtgggtataagatcg

SEQ ID NO: 11921 - DNA, 20 bp, synthetic construct
  source 1..20: mol_type = other DNA
gtataagatcgaggattcca

SEQ ID NO: 11922 - DNA, 20 bp, synthetic construct
  source 1..20: mol_type = other DNA
ctatagccgcgatctcattc

SEQ ID NO: 11923 - DNA, 20 bp, synthetic construct
  source 1..20: mol_type = other DNA
tagccgcgatctcattcagg

SEQ ID NO: 11924 - DNA, 20 bp, synthetic construct
  source 1..20: mol_type = other DNA
cgcgatctcattcaggtggc

SEQ ID NO: 11925 - DNA, 20 bp, synthetic construct
  source 1..20: mol_type = other DNA
gagattggcttcctacaacc

SEQ ID NO: 11926 - DNA, 20 bp, synthetic construct
  source 1..20: mol_type = other DNA
agacccgcgtcaccaccgcc

SEQ ID NO: 11927 - DNA, 20 bp, synthetic construct
  source 1..20: mol_type = other DNA
gccgctgccacatatcaatc

SEQ ID NO: 11928 - DNA, 20 bp, synthetic construct
  source 1..20: mol_type = other DNA
aacgcctgccggatcattat

SEQ ID NO: 11929 - DNA, 20 bp, synthetic construct
  source 1..20: mol_type = other DNA
aaggatgaaactcatactat

SEQ ID NO: 11930 - DNA, 20 bp, synthetic construct
  source 1..20: mol_type = other DNA
ggtattaacaattattcata

SEQ ID NO: 11931 - DNA, 20 bp, synthetic construct
  source 1..20: mol_type = other DNA
ctccagccatacgctggcgc

SEQ ID NO: 11932 - DNA, 20 bp, synthetic construct
  source 1..20: mol_type = other DNA
tccagccatacgctggcgcc

SEQ ID NO: 11933 - DNA, 20 bp, synthetic construct
  source 1..20: mol_type = other DNA
ccatacgctggcgccgggaa

SEQ ID NO: 11934 - DNA, 20 bp, synthetic construct
  source 1..20: mol_type = other DNA
catacgctggcgccgggaaa

SEQ ID NO: 11935 - DNA, 20 bp, synthetic construct
  source 1..20: mol_type = other DNA
ttgattgagttcctctatag

SEQ ID NO: 11936 - DNA, 20 bp, synthetic construct
  source 1..20: mol_type = other DNA
cctctatagaggcaaactca

SEQ ID NO: 11937 - DNA, 20 bp, synthetic construct
  source 1..20: mol_type = other DNA
ctctatagaggcaaactcag

SEQ ID NO: 11938 - DNA, 20 bp, synthetic construct
  source 1..20: mol_type = other DNA
tgatcagcgtgtggttcagc

SEQ ID NO: 11939 - DNA, 20 bp, synthetic construct
  source 1..20: mol_type = other DNA
gatcagcgtgtggttcagcg

SEQ ID NO: 11940 - DNA, 20 bp, synthetic construct
  source 1..20: mol_type = other DNA
tggtaaagctcacgcctgta

SEQ ID NO: 11941 - DNA, 20 bp, synthetic construct
  source 1..20: mol_type = other DNA
gcgaatgtaaacaattgcgc

SEQ ID NO: 11942 - DNA, 20 bp, synthetic construct
  source 1..20: mol_type = other DNA
acgatacggttgagactatt

SEQ ID NO: 11943 - DNA, 20 bp, synthetic construct
  source 1..20: mol_type = other DNA
gcaaccgtaggaacacgcag

SEQ ID NO: 11944 - DNA, 20 bp, synthetic construct
  source 1..20: mol_type = other DNA
tgccgtagctgtagtagtat

SEQ ID NO: 11945 - DNA, 20 bp, synthetic construct
  source 1..20: mol_type = other DNA
gcccttgaaattgtaattgg

SEQ ID NO: 11946 - DNA, 20 bp, synthetic construct
  source 1..20: mol_type = other DNA
tgtaattggagggccgcagc

SEQ ID NO: 11947 - DNA, 20 bp, synthetic construct
  source 1..20: mol_type = other DNA
gtcgacgtaggccctcacca

SEQ ID NO: 11948 - DNA, 20 bp, synthetic construct
  source 1..20: mol_type = other DNA
gtgtacttccagccctccga

SEQ ID NO: 11949 - DNA, 20 bp, synthetic construct
  source 1..20: mol_type = other DNA
tgtacttccagccctccgat

SEQ ID NO: 11950 - DNA, 20 bp, synthetic construct
  source 1..20: mol_type = other DNA
ataatagcaagcggcaatac

SEQ ID NO: 11951 - DNA, 20 bp, synthetic construct
  source 1..20: mol_type = other DNA
aatacaggcacgtagtactc

SEQ ID NO: 11952 - DNA, 20 bp, synthetic construct
  source 1..20: mol_type = other DNA
agtactctggttccgcccgc

SEQ ID NO: 11953 - DNA, 20 bp, synthetic construct
  source 1..20: mol_type = other DNA
ctggccgtcctcaaagacgt

SEQ ID NO: 11954 - DNA, 20 bp, synthetic construct
  source 1..20: mol_type = other DNA
tggccgtcctcaaagacgta

SEQ ID NO: 11955 - DNA, 20 bp, synthetic construct
  source 1..20: mol_type = other DNA
ggccgtcctcaaagacgtag

SEQ ID NO: 11956 - DNA, 20 bp, synthetic construct
  source 1..20: mol_type = other DNA
gagaagccatgagtcctccg

SEQ ID NO: 11957 - DNA, 20 bp, synthetic construct
  source 1..20: mol_type = other DNA
agaagccatgagtcctccgc

SEQ ID NO: 11958 - DNA, 20 bp, synthetic construct
  source 1..20: mol_type = other DNA
cttcctatgcctatgaatac

SEQ ID NO: 11959 - DNA, 20 bp, synthetic construct
  source 1..20: mol_type = other DNA
tgcctatgaatactggatag

SEQ ID NO: 11960 - DNA, 20 bp, synthetic construct
  source 1..20: mol_type = other DNA
ggagcccgggtaatactggg

SEQ ID NO: 11961 - DNA, 20 bp, synthetic construct
  source 1..20: mol_type = other DNA
cgtcattccgtctaagaagt

SEQ ID NO: 11962 - DNA, 20 bp, synthetic construct
  source 1..20: mol_type = other DNA
gttgggaatctgccgctcga

SEQ ID NO: 11963 - DNA, 20 bp, synthetic construct
  source 1..20: mol_type = other DNA
ggcatccagcttgtaagcct

SEQ ID NO: 11964 - DNA, 20 bp, synthetic construct
  source 1..20: mol_type = other DNA
aattcgtcggacactatgaa

SEQ ID NO: 11965 - DNA, 20 bp, synthetic construct
  source 1..20: mol_type = other DNA
cactatgaatggactgcgtc

SEQ ID NO: 11966 - DNA, 20 bp, synthetic construct
  source 1..20: mol_type = other DNA
ttcagtgagcggcaccacgc

SEQ ID NO: 11967 - DNA, 20 bp, synthetic construct
  source 1..20: mol_type = other DNA
tacagtatgattgactaagc

SEQ ID NO: 11968 - DNA, 20 bp, synthetic construct
  source 1..20: mol_type = other DNA
ttcgtacacacgtatcagcg

SEQ ID NO: 11969 - DNA, 20 bp, synthetic construct
  source 1..20: mol_type = other DNA
ctgttcgttgcgcaccatga

SEQ ID NO: 11970 - DNA, 20 bp, synthetic construct
  source 1..20: mol_type = other DNA
gatcatgccgcagaagtcaa

SEQ ID NO: 11971 - DNA, 20 bp, synthetic construct
  source 1..20: mol_type = other DNA
aagtcaaaggagggcccgct

SEQ ID NO: 11972 - DNA, 20 bp, synthetic construct
  source 1..20: mol_type = other DNA
agtcaaaggagggcccgctt

SEQ ID NO: 11973 - DNA, 20 bp, synthetic construct
  source 1..20: mol_type = other DNA
gggtcagtcccgtgcgcaac

SEQ ID NO: 11974 - DNA, 20 bp, synthetic construct
  source 1..20: mol_type = other DNA
ggtcagtcccgtgcgcaaca

SEQ ID NO: 11975 - DNA, 20 bp, synthetic construct
  source 1..20: mol_type = other DNA
tgctaagttcatccttccgc

SEQ ID NO: 11976 - DNA, 20 bp, synthetic construct
  source 1..20: mol_type = other DNA
aagttcatccttccgctggc

SEQ ID NO: 11977 - DNA, 20 bp, synthetic construct
  source 1..20: mol_type = other DNA
tggccggtccattctatgcc

SEQ ID NO: 11978 - DNA, 20 bp, synthetic construct
  source 1..20: mol_type = other DNA
acgaccgccgcaacctgcag

SEQ ID NO: 11979 - DNA, 20 bp, synthetic construct
  source 1..20: mol_type = other DNA
cgaccgccgcaacctgcaga

SEQ ID NO: 11980 - DNA, 20 bp, synthetic construct
  source 1..20: mol_type = other DNA
tgcagagggtgcaggctata

SEQ ID NO: 11981 - DNA, 20 bp, synthetic construct
  source 1..20: mol_type = other DNA
gccgtatgtatcgtgctatt

SEQ ID NO: 11982 - DNA, 20 bp, synthetic construct
  source 1..20: mol_type = other DNA
tgctattaggcgcgctcaac

SEQ ID NO: 11983 - DNA, 20 bp, synthetic construct
  source 1..20: mol_type = other DNA
gctattaggcgcgctcaaca

SEQ ID NO: 11984 - DNA, 20 bp, synthetic construct
  source 1..20: mol_type = other DNA
cttatcattgtaataaatgg

SEQ ID NO: 11985 - DNA, 20 bp, synthetic construct
  source 1..20: mol_type = other DNA
ttcccacgtaggccgcgcat

SEQ ID NO: 11986 - DNA, 20 bp, synthetic construct
  source 1..20: mol_type = other DNA
cacgtaggccgcgcattggc

SEQ ID NO: 11987 - DNA, 20 bp, synthetic construct
  source 1..20: mol_type = other DNA
gcaggcgcgaagataaatcc

SEQ ID NO: 11988 - DNA, 20 bp, synthetic construct
  source 1..20: mol_type = other DNA
ggcgcgaagataaatccagg

SEQ ID NO: 11989 - DNA, 20 bp, synthetic construct
  source 1..20: mol_type = other DNA
gctccgcgtaccctagttcc

SEQ ID NO: 11990 - DNA, 20 bp, synthetic construct
  source 1..20: mol_type = other DNA
taccctagttcctggtatac

SEQ ID NO: 11991 - DNA, 20 bp, synthetic construct
  source 1..20: mol_type = other DNA
gctcaatgatatctaggcgc

SEQ ID NO: 11992 - DNA, 20 bp, synthetic construct
  source 1..20: mol_type = other DNA
gccgtcggcggtggtaagaa

SEQ ID NO: 11993 - DNA, 20 bp, synthetic construct
  source 1..20: mol_type = other DNA
ggcccactgcgaatgcacca

SEQ ID NO: 11994 - DNA, 20 bp, synthetic construct
  source 1..20: mol_type = other DNA
gagcttcagcccgacgccgt

SEQ ID NO: 11995 - DNA, 20 bp, synthetic construct
  source 1..20: mol_type = other DNA
ggccttattgatgttcgttc

SEQ ID NO: 11996 - DNA, 20 bp, synthetic construct
  source 1..20: mol_type = other DNA
gggaacatacacatcgcgct

SEQ ID NO: 11997 - DNA, 20 bp, synthetic construct
  source 1..20: mol_type = other DNA
atcgcgcttggcgataagac

SEQ ID NO: 11998 - DNA, 20 bp, synthetic construct
  source 1..20: mol_type = other DNA
cgccataaggtcctcatctt

SEQ ID NO: 11999 - DNA, 20 bp, synthetic construct
  source 1..20: mol_type = other DNA
aaacttatacatgtcttcgt

SEQ ID NO: 12000 - DNA, 20 bp, synthetic construct
  source 1..20: mol_type = other DNA
gtcttcgtcggtaatcctag

SEQ ID NO: 12001 - DNA, 20 bp, synthetic construct
  source 1..20: mol_type = other DNA
gggcgtatgacacgttgtcg

SEQ ID NO: 12002 - DNA, 20 bp, synthetic construct
  source 1..20: mol_type = other DNA
cgaccgctggtgacgaatgt

SEQ ID NO: 12003 - DNA, 20 bp, synthetic construct
  source 1..20: mol_type = other DNA
ccgttccatccagcgaataa

SEQ ID NO: 12004 - DNA, 20 bp, synthetic construct
  source 1..20: mol_type = other DNA
cgttccatccagcgaataac

SEQ ID NO: 12005 - DNA, 20 bp, synthetic construct
  source 1..20: mol_type = other DNA
atccagcgaataacgggacc

SEQ ID NO: 12006 - DNA, 20 bp, synthetic construct
  source 1..20: mol_type = other DNA
tccagcgaataacgggacct

SEQ ID NO: 12007 - DNA, 20 bp, synthetic construct
  source 1..20: mol_type = other DNA
cagcgaataacgggacctgg

SEQ ID NO: 12008 - DNA, 20 bp, synthetic construct
  source 1..20: mol_type = other DNA
agcgaataacgggacctggg

SEQ ID NO: 12009 - DNA, 20 bp, synthetic construct
  source 1..20: mol_type = other DNA
acgcatccgaaggtgttaca

SEQ ID NO: 12010 - DNA, 20 bp, synthetic construct
  source 1..20: mol_type = other DNA
ttgttgcgcataggccttca

SEQ ID NO: 12011 - DNA, 20 bp, synthetic construct
  source 1..20: mol_type = other DNA
ttgcgcataggccttcacgg

SEQ ID NO: 12012 - DNA, 20 bp, synthetic construct
  source 1..20: mol_type = other DNA
tgcgcataggccttcacggc

SEQ ID NO: 12013 - DNA, 20 bp, synthetic construct
  source 1..20: mol_type = other DNA
gcgcataggccttcacggcg

SEQ ID NO: 12014 - DNA, 20 bp, synthetic construct
  source 1..20: mol_type = other DNA
gtctgttgtggtcggaggcg

SEQ ID NO: 12015 - DNA, 20 bp, synthetic construct
  source 1..20: mol_type = other DNA
ggagtactctctgaataact

SEQ ID NO: 12016 - DNA, 20 bp, synthetic construct
  source 1..20: mol_type = other DNA
ctgcgaatacatcatgcccg

SEQ ID NO: 12017 - DNA, 20 bp, synthetic construct
  source 1..20: mol_type = other DNA
ggcagacatgatccaccacg

SEQ ID NO: 12018 - DNA, 20 bp, synthetic construct
  source 1..20: mol_type = other DNA
gcttaaacatattcgccaat

SEQ ID NO: 12019 - DNA, 20 bp, synthetic construct
  source 1..20: mol_type = other DNA
gcatgctattcgtcgcactc

SEQ ID NO: 12020 - DNA, 20 bp, synthetic construct
  source 1..20: mol_type = other DNA
tgctattcgtcgcactcagg

SEQ ID NO: 12021 - DNA, 20 bp, synthetic construct
  source 1..20: mol_type = other DNA
gctattcgtcgcactcaggt

SEQ ID NO: 12022 - DNA, 20 bp, synthetic construct
  source 1..20: mol_type = other DNA
attcgtcgcactcaggtggg

SEQ ID NO: 12023 - DNA, 20 bp, synthetic construct
  source 1..20: mol_type = other DNA
tgaaccgcgctgcttgtagc

SEQ ID NO: 12024 - DNA, 20 bp, synthetic construct
  source 1..20: mol_type = other DNA
gaaccgcgctgcttgtagct

SEQ ID NO: 12025 - DNA, 20 bp, synthetic construct
  source 1..20: mol_type = other DNA
tgggatacactcaacagtcc

SEQ ID NO: 12026 - DNA, 20 bp, synthetic construct
  source 1..20: mol_type = other DNA
tatatgccgcaaatacaatc

SEQ ID NO: 12027 - DNA, 20 bp, synthetic construct
  source 1..20: mol_type = other DNA
ctctatgggcatctacgtcg

SEQ ID NO: 12028 - DNA, 20 bp, synthetic construct
  source 1..20: mol_type = other DNA
gtgtgcggcattcatcagct

SEQ ID NO: 12029 - DNA, 20 bp, synthetic construct
  source 1..20: mol_type = other DNA
agtccatgctcccgcttgcc

SEQ ID NO: 12030 - DNA, 20 bp, synthetic construct
  source 1..20: mol_type = other DNA
catcacgatctgctctacac

SEQ ID NO: 12031 - DNA, 20 bp, synthetic construct
  source 1..20: mol_type = other DNA
gtgtcccgaaatgccaaatg

SEQ ID NO: 12032 - DNA, 20 bp, synthetic construct
  source 1..20: mol_type = other DNA
taaagcctcgccatctccca

SEQ ID NO: 12033 - DNA, 20 bp, synthetic construct
  source 1..20: mol_type = other DNA
agcgtgcatagctgtctctg

SEQ ID NO: 12034 - DNA, 20 bp, synthetic construct
  source 1..20: mol_type = other DNA
tgggaatgttaatgcagaac

SEQ ID NO: 12035 - DNA, 20 bp, synthetic construct
  source 1..20: mol_type = other DNA
gaatgttaatgcagaacagg

SEQ ID NO: 12036 - DNA, 20 bp, synthetic construct
  source 1..20: mol_type = other DNA
gcgttctcatgtcgcctccg

SEQ ID NO: 12037 - DNA, 20 bp, synthetic construct
  source 1..20: mol_type = other DNA
tcataacctgtcaacccgcg

SEQ ID NO: 12038 - DNA, 20 bp, synthetic construct
  source 1..20: mol_type = other DNA
cataacctgtcaacccgcga

SEQ ID NO: 12039 - DNA, 20 bp, synthetic construct
  source 1..20: mol_type = other DNA
catacgatcgccagatatcc

SEQ ID NO: 12040 - DNA, 20 bp, synthetic construct
  source 1..20: mol_type = other DNA
ggaacaactgcgattcttct

SEQ ID NO: 12041 - DNA, 20 bp, synthetic construct
  source 1..20: mol_type = other DNA
gcagcagttggcgcgaagaa

SEQ ID NO: 12042 - DNA, 20 bp, synthetic construct
  source 1..20: mol_type = other DNA
attaaactggcagaccggga

SEQ ID NO: 12043 - DNA, 20 bp, synthetic construct
  source 1..20: mol_type = other DNA
aggaggtcgctgagctacac

SEQ ID NO: 12044 - DNA, 20 bp, synthetic construct
  source 1..20: mol_type = other DNA
gcaccacgtcggttgaatca

SEQ ID NO: 12045 - DNA, 20 bp, synthetic construct
  source 1..20: mol_type = other DNA
ttgaatcacggcatctaaat

SEQ ID NO: 12046 - DNA, 20 bp, synthetic construct
  source 1..20: mol_type = other DNA
atcagcgaggccgagacaaa

SEQ ID NO: 12047 - DNA, 20 bp, synthetic construct
  source 1..20: mol_type = other DNA
cgagacaaacggcctcatcc

SEQ ID NO: 12048 - DNA, 20 bp, synthetic construct
  source 1..20: mol_type = other DNA
atgtcggcaacgcccgtaac

SEQ ID NO: 12049 - DNA, 20 bp, synthetic construct
  source 1..20: mol_type = other DNA
tgtcggcaacgcccgtaacc

SEQ ID NO: 12050 - DNA, 20 bp, synthetic construct
  source 1..20: mol_type = other DNA
ccgcggcatgagctgcccaa

SEQ ID NO: 12051 - DNA, 20 bp, synthetic construct
  source 1..20: mol_type = other DNA
gcagtgggcattccgttaaa

SEQ ID NO: 12052 - DNA, 20 bp, synthetic construct
  source 1..20: mol_type = other DNA
tggaaagactcagcaccgga

SEQ ID NO: 12053 - DNA, 20 bp, synthetic construct
  source 1..20: mol_type = other DNA
ggaaagactcagcaccggaa

SEQ ID NO: 12054 - DNA, 20 bp, synthetic construct
  source 1..20: mol_type = other DNA
caaacggaacccaaggctta

SEQ ID NO: 12055 - DNA, 20 bp, synthetic construct
  source 1..20: mol_type = other DNA
ggcaagcacagactggcttc

SEQ ID NO: 12056 - DNA, 20 bp, synthetic construct
  source 1..20: mol_type = other DNA
gcagccaccaacgcacatct

SEQ ID NO: 12057 - DNA, 20 bp, synthetic construct
  source 1..20: mol_type = other DNA
cagccaccaacgcacatctc

SEQ ID NO: 12058 - DNA, 20 bp, synthetic construct
  source 1..20: mol_type = other DNA
accaacgcacatctcgggat

SEQ ID NO: 12059 - DNA, 20 bp, synthetic construct
  source 1..20: mol_type = other DNA
ttccattattcggcaaggcc

SEQ ID NO: 12060 - DNA, 20 bp, synthetic construct
  source 1..20: mol_type = other DNA
tccattattcggcaaggccg

SEQ ID NO: 12061 - DNA, 20 bp, synthetic construct
  source 1..20: mol_type = other DNA
ccattattcggcaaggccgg

SEQ ID NO: 12062 - DNA, 20 bp, synthetic construct
  source 1..20: mol_type = other DNA
ccacaatcgggtccgcatgt

SEQ ID NO: 12063 - DNA, 20 bp, synthetic construct
  source 1..20: mol_type = other DNA
cacaatcgggtccgcatgtc

SEQ ID NO: 12064 - DNA, 20 bp, synthetic construct
  source 1..20: mol_type = other DNA
acaatcgggtccgcatgtcg

SEQ ID NO: 12065 - DNA, 20 bp, synthetic construct
  source 1..20: mol_type = other DNA
caatcgggtccgcatgtcgg

SEQ ID NO: 12066 - DNA, 20 bp, synthetic construct
  source 1..20: mol_type = other DNA
cgctgtacgcgaacgaagcc

SEQ ID NO: 12067 - DNA, 20 bp, synthetic construct
  source 1..20: mol_type = other DNA
aacgcctcgtccaacctgga

SEQ ID NO: 12068 - DNA, 20 bp, synthetic construct
  source 1..20: mol_type = other DNA
caccagctgcgtattctcat

SEQ ID NO: 12069 - DNA, 20 bp, synthetic construct
  source 1..20: mol_type = other DNA
gcgtattctcatcgggtcca

SEQ ID NO: 12070 - DNA, 20 bp, synthetic construct
  source 1..20: mol_type = other DNA
catcgggtccaaggtgattg

SEQ ID NO: 12071 - DNA, 20 bp, synthetic construct
  source 1..20: mol_type = other DNA
cgggtccaaggtgattgtgg

SEQ ID NO: 12072 - DNA, 20 bp, synthetic construct
  source 1..20: mol_type = other DNA
tacgtatcgacaacacccga

SEQ ID NO: 12073 - DNA, 20 bp, synthetic construct
  source 1..20: mol_type = other DNA
gtatcgacaacacccgatgg

SEQ ID NO: 12074 - DNA, 20 bp, synthetic construct
  source 1..20: mol_type = other DNA
tatcgacaacacccgatgga

SEQ ID NO: 12075 - DNA, 20 bp, synthetic construct
  source 1..20: mol_type = other DNA
ctgcgaaagcacgccattga

SEQ ID NO: 12076 - DNA, 20 bp, synthetic construct
  source 1..20: mol_type = other DNA
tgcgaaagcacgccattgat

SEQ ID NO: 12077 - DNA, 20 bp, synthetic construct
  source 1..20: mol_type = other DNA
taagattgataagcctatgc

SEQ ID NO: 12078 - DNA, 20 bp, synthetic construct
  source 1..20: mol_type = other DNA
ccttagtccatccatcacgc

SEQ ID NO: 12079 - DNA, 20 bp, synthetic construct
  source 1..20: mol_type = other DNA
tccatcacgccggcaaacgt

SEQ ID NO: 12080 - DNA, 20 bp, synthetic construct
  source 1..20: mol_type = other DNA
tgtggacgtactccgagcta

SEQ ID NO: 12081 - DNA, 20 bp, synthetic construct
  source 1..20: mol_type = other DNA
gacgtactccgagctatgga

SEQ ID NO: 12082 - DNA, 20 bp, synthetic construct
  source 1..20: mol_type = other DNA
tccacgcccaagctcataca

SEQ ID NO: 12083 - DNA, 20 bp, synthetic construct
  source 1..20: mol_type = other DNA
ctcagaggacaacttcgcgc

SEQ ID NO: 12084 - DNA, 20 bp, synthetic construct
  source 1..20: mol_type = other DNA
tcaggatgagccaatggagc

SEQ ID NO: 12085 - DNA, 20 bp, synthetic construct
  source 1..20: mol_type = other DNA
cttattatagataatcttgc

SEQ ID NO: 12086 - DNA, 20 bp, synthetic construct
  source 1..20: mol_type = other DNA
tatagataatcttgcaggta

SEQ ID NO: 12087 - DNA, 20 bp, synthetic construct
  source 1..20: mol_type = other DNA
atagataatcttgcaggtat

SEQ ID NO: 12088 - DNA, 20 bp, synthetic construct
  source 1..20: mol_type = other DNA
tagataatcttgcaggtatg

SEQ ID NO: 12089 - DNA, 20 bp, synthetic construct
  source 1..20: mol_type = other DNA
agataatcttgcaggtatgg

SEQ ID NO: 12090 - DNA, 20 bp, synthetic construct
  source 1..20: mol_type = other DNA
cactctggtgggctatgcca

SEQ ID NO: 12091 - DNA, 20 bp, synthetic construct
  source 1..20: mol_type = other DNA
tctggtgggctatgccacgg

SEQ ID NO: 12092 - DNA, 20 bp, synthetic construct
  source 1..20: mol_type = other DNA
cgacattgtcataggctata

SEQ ID NO: 12093 - DNA, 20 bp, synthetic construct
  source 1..20: mol_type = other DNA
ctgatattcgcatgctaaac

SEQ ID NO: 12094 - DNA, 20 bp, synthetic construct
  source 1..20: mol_type = other DNA
gatattcgcatgctaaaccg

SEQ ID NO: 12095 - DNA, 20 bp, synthetic construct
  source 1..20: mol_type = other DNA
ggagccgtatgcgaaacacg

SEQ ID NO: 12096 - DNA, 20 bp, synthetic construct
  source 1..20: mol_type = other DNA
ccgtatgcgaaacacgcgga

SEQ ID NO: 12097 - DNA, 20 bp, synthetic construct
  source 1..20: mol_type = other DNA
cgtatgcgaaacacgcggac

SEQ ID NO: 12098 - DNA, 20 bp, synthetic construct
  source 1..20: mol_type = other DNA
atgcgaaacacgcggacggg

SEQ ID NO: 12099 - DNA, 20 bp, synthetic construct
  source 1..20: mol_type = other DNA
gaatgcaggatggaatccgc

SEQ ID NO: 12100 - DNA, 20 bp, synthetic construct
  source 1..20: mol_type = other DNA
attatgcgtacgaataatag

SEQ ID NO: 12101 - DNA, 20 bp, synthetic construct
  source 1..20: mol_type = other DNA
cgtacgaataatagcggaag

SEQ ID NO: 12102 - DNA, 20 bp, synthetic construct
  source 1..20: mol_type = other DNA
agcagcgtgtactatatacc

SEQ ID NO: 12103 - DNA, 20 bp, synthetic construct
  source 1..20: mol_type = other DNA
ctatatacctggcagacaac

SEQ ID NO: 12104 - DNA, 20 bp, synthetic construct
  source 1..20: mol_type = other DNA
gacaacaggccagtgccacg

SEQ ID NO: 12105 - DNA, 20 bp, synthetic construct
  source 1..20: mol_type = other DNA
ttcagtctatcacgtgcaag

SEQ ID NO: 12106 - DNA, 20 bp, synthetic construct
  source 1..20: mol_type = other DNA
cgtgcaagaggagcttacac

SEQ ID NO: 12107 - DNA, 20 bp, synthetic construct
  source 1..20: mol_type = other DNA
ctatacctactctataagct

SEQ ID NO: 12108 - DNA, 20 bp, synthetic construct
  source 1..20: mol_type = other DNA
tctccttaagtcctcgccat

SEQ ID NO: 12109 - DNA, 20 bp, synthetic construct
  source 1..20: mol_type = other DNA
taagacgattgaatatcaaa

SEQ ID NO: 12110 - DNA, 20 bp, synthetic construct
  source 1..20: mol_type = other DNA
agaacatgttatcctcacgg

SEQ ID NO: 12111 - DNA, 20 bp, synthetic construct
  source 1..20: mol_type = other DNA
atcctcacggaggataacca

SEQ ID NO: 12112 - DNA, 20 bp, synthetic construct
  source 1..20: mol_type = other DNA
ttaaatgcaggcccgatcat

SEQ ID NO: 12113 - DNA, 20 bp, synthetic construct
  source 1..20: mol_type = other DNA
caggcccgatcataggctcc

SEQ ID NO: 12114 - DNA, 20 bp, synthetic construct
  source 1..20: mol_type = other DNA
gtaatattcgcgggtaatcc

SEQ ID NO: 12115 - DNA, 20 bp, synthetic construct
  source 1..20: mol_type = other DNA
ttcttcttcaaactcccgta

SEQ ID NO: 12116 - DNA, 20 bp, synthetic construct
  source 1..20: mol_type = other DNA
ttcaaactcccgtatggcac

SEQ ID NO: 12117 - DNA, 20 bp, synthetic construct
  source 1..20: mol_type = other DNA
aggtccgactcatcttcctt

SEQ ID NO: 12118 - DNA, 20 bp, synthetic construct
  source 1..20: mol_type = other DNA
tcttccttcggcttaccctt

SEQ ID NO: 12119 - DNA, 20 bp, synthetic construct
  source 1..20: mol_type = other DNA
tagaagtcgccattgctgaa

SEQ ID NO: 12120 - DNA, 20 bp, synthetic construct
  source 1..20: mol_type = other DNA
cgccattgctgaagggtaac

SEQ ID NO: 12121 - DNA, 20 bp, synthetic construct
  source 1..20: mol_type = other DNA
taagacctgttctcccaaca

SEQ ID NO: 12122 - DNA, 20 bp, synthetic construct
  source 1..20: mol_type = other DNA
gacctgttctcccaacatgg

SEQ ID NO: 12123 - DNA, 20 bp, synthetic construct
  source 1..20: mol_type = other DNA
gcttatggcacagaacggcc

SEQ ID NO: 12124 - DNA, 20 bp, synthetic construct
  source 1..20: mol_type = other DNA
tcataagatagtgaataaac

SEQ ID NO: 12125 - DNA, 20 bp, synthetic construct
  source 1..20: mol_type = other DNA
ccttgggaaacccgtaaatt

SEQ ID NO: 12126 - DNA, 20 bp, synthetic construct
  source 1..20: mol_type = other DNA
ttgatgcaacacgtaaatgt

SEQ ID NO: 12127 - DNA, 20 bp, synthetic construct
  source 1..20: mol_type = other DNA
tggtagcgtgcttgtgctgt

SEQ ID NO: 12128 - DNA, 20 bp, synthetic construct
  source 1..20: mol_type = other DNA
ggtagcgtgcttgtgctgtc

SEQ ID NO: 12129 - DNA, 20 bp, synthetic construct
  source 1..20: mol_type = other DNA
ataaacaagctccgcgagcg

SEQ ID NO: 12130 - DNA, 20 bp, synthetic construct
  source 1..20: mol_type = other DNA
caagctccgcgagcgcggtt

SEQ ID NO: 12131 - DNA, 20 bp, synthetic construct
  source 1..20: mol_type = other DNA
tattccaagatcgataaccc

SEQ ID NO: 12132 - DNA, 20 bp, synthetic construct
  source 1..20: mol_type = other DNA
cggcgaagtacattccagaa

SEQ ID NO: 12133 - DNA, 20 bp, synthetic construct
  source 1..20: mol_type = other DNA
atagttaagccatgtgagtt

SEQ ID NO: 12134 - DNA, 20 bp, synthetic construct
  source 1..20: mol_type = other DNA
tccgatggctgaaactgtac

SEQ ID NO: 12135 - DNA, 20 bp, synthetic construct
  source 1..20: mol_type = other DNA
gcctacaaatagtagatgca

SEQ ID NO: 12136 - DNA, 20 bp, synthetic construct
  source 1..20: mol_type = other DNA
aaagtctaatgtgttatccc

SEQ ID NO: 12137 - DNA, 20 bp, synthetic construct
  source 1..20: mol_type = other DNA
tgatgccatcaatagaatat

SEQ ID NO: 12138 - DNA, 20 bp, synthetic construct
  source 1..20: mol_type = other DNA
gcacttgttagcgaaataaa

SEQ ID NO: 12139 - DNA, 20 bp, synthetic construct
  source 1..20: mol_type = other DNA
tggtacctaggctgtatagc

SEQ ID NO: 12140 - DNA, 20 bp, synthetic construct
  source 1..20: mol_type = other DNA
gtccgttacatagtagccaa

SEQ ID NO: 12141 - DNA, 20 bp, synthetic construct
  source 1..20: mol_type = other DNA
tccgttacatagtagccaac

SEQ ID NO: 12142 - DNA, 20 bp, synthetic construct
  source 1..20: mol_type = other DNA
gttacatagtagccaacggg

SEQ ID NO: 12143 - DNA, 20 bp, synthetic construct
  source 1..20: mol_type = other DNA
caatgaattcaatggcctgg

SEQ ID NO: 12144 - DNA, 20 bp, synthetic construct
  source 1..20: mol_type = other DNA
gctgttagcattaaatggtt

SEQ ID NO: 12145 - DNA, 20 bp, synthetic construct
  source 1..20: mol_type = other DNA
ttataacatctgccgccgtt

SEQ ID NO: 12146 - DNA, 20 bp, synthetic construct
  source 1..20: mol_type = other DNA
tataacatctgccgccgtta

SEQ ID NO: 12147 - DNA, 20 bp, synthetic construct
  source 1..20: mol_type = other DNA
atctgccgccgttagggatt

SEQ ID NO: 12148 - DNA, 20 bp, synthetic construct
  source 1..20: mol_type = other DNA
tctgccgccgttagggattc

SEQ ID NO: 12149 - DNA, 20 bp, synthetic construct
  source 1..20: mol_type = other DNA
tgccacaacggtagtccacc

SEQ ID NO: 12150 - DNA, 20 bp, synthetic construct
  source 1..20: mol_type = other DNA
ggtagtccaccaggcattca

SEQ ID NO: 12151 - DNA, 20 bp, synthetic construct
  source 1..20: mol_type = other DNA
atcgtgcagcgcaagcgcaa

SEQ ID NO: 12152 - DNA, 20 bp, synthetic construct
  source 1..20: mol_type = other DNA
gcgcaatggcgttcgagctg

SEQ ID NO: 12153 - DNA, 20 bp, synthetic construct
  source 1..20: mol_type = other DNA
cattctcttgtattcgcgca

SEQ ID NO: 12154 - DNA, 20 bp, synthetic construct
  source 1..20: mol_type = other DNA
cttgtattcgcgcacggaaa

SEQ ID NO: 12155 - DNA, 20 bp, synthetic construct
  source 1..20: mol_type = other DNA
tatagacgtgagagtatatt

SEQ ID NO: 12156 - DNA, 20 bp, synthetic construct
  source 1..20: mol_type = other DNA
tacaccgcaaacctctgcaa

SEQ ID NO: 12157 - DNA, 20 bp, synthetic construct
  source 1..20: mol_type = other DNA
caaacctctgcaatggatcg

SEQ ID NO: 12158 - DNA, 20 bp, synthetic construct
  source 1..20: mol_type = other DNA
aaacctctgcaatggatcgc

SEQ ID NO: 12159 - DNA, 20 bp, synthetic construct
  source 1..20: mol_type = other DNA
aacctctgcaatggatcgcg

SEQ ID NO: 12160 - DNA, 20 bp, synthetic construct
  source 1..20: mol_type = other DNA
tagcgtgaagaatgtggatg

SEQ ID NO: 12161 - DNA, 20 bp, synthetic construct
  source 1..20: mol_type = other DNA
ggatgaggcccttaggctta

SEQ ID NO: 12162 - DNA, 20 bp, synthetic construct
  source 1..20: mol_type = other DNA
gccatcgtacgcaatgccaa

SEQ ID NO: 12163 - DNA, 20 bp, synthetic construct
  source 1..20: mol_type = other DNA
ccatcgtacgcaatgccaat

SEQ ID NO: 12164 - DNA, 20 bp, synthetic construct
  source 1..20: mol_type = other DNA
tgccaatgggccctatgagc

SEQ ID NO: 12165 - DNA, 20 bp, synthetic construct
  source 1..20: mol_type = other DNA
gccaatgggccctatgagcc

SEQ ID NO: 12166 - DNA, 20 bp, synthetic construct
  source 1..20: mol_type = other DNA
cctcttcaggcccgtgcggt

SEQ ID NO: 12167 - DNA, 20 bp, synthetic construct
  source 1..20: mol_type = other DNA
gccgttcagttcaatattgc

SEQ ID NO: 12168 - DNA, 20 bp, synthetic construct
  source 1..20: mol_type = other DNA
gacaatgaccataagaggca

SEQ ID NO: 12169 - DNA, 20 bp, synthetic construct
  source 1..20: mol_type = other DNA
gggcacccttcccgccgagg

SEQ ID NO: 12170 - DNA, 20 bp, synthetic construct
  source 1..20: mol_type = other DNA
gggtatctatgatgcgcgaa

SEQ ID NO: 12171 - DNA, 20 bp, synthetic construct
  source 1..20: mol_type = other DNA
ggtatctatgatgcgcgaat

SEQ ID NO: 12172 - DNA, 20 bp, synthetic construct
  source 1..20: mol_type = other DNA
acaccagcgcaagcaatgta

SEQ ID NO: 12173 - DNA, 20 bp, synthetic construct
  source 1..20: mol_type = other DNA
caccagcgcaagcaatgtat

SEQ ID NO: 12174 - DNA, 20 bp, synthetic construct
  source 1..20: mol_type = other DNA
agcaatgtatgggacaccct

SEQ ID NO: 12175 - DNA, 20 bp, synthetic construct
  source 1..20: mol_type = other DNA
tcatcgccgaaatacgacga

SEQ ID NO: 12176 - DNA, 20 bp, synthetic construct
  source 1..20: mol_type = other DNA
ccgaaatacgacgatggtta

SEQ ID NO: 12177 - DNA, 20 bp, synthetic construct
  source 1..20: mol_type = other DNA
cgaaatacgacgatggttaa

SEQ ID NO: 12178 - DNA, 20 bp, synthetic construct
  source 1..20: mol_type = other DNA
agggttatatgcctcaactg

SEQ ID NO: 12179 - DNA, 20 bp, synthetic construct
  source 1..20: mol_type = other DNA
gggttatatgcctcaactgc

SEQ ID NO: 12180 - DNA, 20 bp, synthetic construct
  source 1..20: mol_type = other DNA
gcctaagcgtcttattgaag

SEQ ID NO: 12181 - DNA, 20 bp, synthetic construct
  source 1..20: mol_type = other DNA
gcggcttcaagccaaaccga

SEQ ID NO: 12182 - DNA, 20 bp, synthetic construct
  source 1..20: mol_type = other DNA
aaagcagtgctacgtctgta

SEQ ID NO: 12183 - DNA, 20 bp, synthetic construct
  source 1..20: mol_type = other DNA
catacgacctggcatcagat

SEQ ID NO: 12184 - DNA, 20 bp, synthetic construct
  source 1..20: mol_type = other DNA
atacgacctggcatcagatt

SEQ ID NO: 12185 - DNA, 20 bp, synthetic construct
  source 1..20: mol_type = other DNA
atcagattgggaatcgggtc

SEQ ID NO: 12186 - DNA, 20 bp, synthetic construct
  source 1..20: mol_type = other DNA
taataacgtgatccagtatc

SEQ ID NO: 12187 - DNA, 20 bp, synthetic construct
  source 1..20: mol_type = other DNA
aaagaatctgctgatcccga

SEQ ID NO: 12188 - DNA, 20 bp, synthetic construct
  source 1..20: mol_type = other DNA
aaggacctacaaatcgtgcg

SEQ ID NO: 12189 - DNA, 20 bp, synthetic construct
  source 1..20: mol_type = other DNA
accgcaacccagggaggcac

SEQ ID NO: 12190 - DNA, 20 bp, synthetic construct
  source 1..20: mol_type = other DNA
ggaaagcgtgggatcgtcat

SEQ ID NO: 12191 - DNA, 20 bp, synthetic construct
  source 1..20: mol_type = other DNA
aaagcgtgggatcgtcatgg

SEQ ID NO: 12192 - DNA, 20 bp, synthetic construct
  source 1..20: mol_type = other DNA
gcgaagacttcctcgcaagg

SEQ ID NO: 12193 - DNA, 20 bp, synthetic construct
  source 1..20: mol_type = other DNA
cgaagacttcctcgcaagga

SEQ ID NO: 12194 - DNA, 20 bp, synthetic construct
  source 1..20: mol_type = other DNA
agaattcgtaaatccctact

SEQ ID NO: 12195 - DNA, 20 bp, synthetic construct
  source 1..20: mol_type = other DNA
gccaggtatggtcgatcagc

SEQ ID NO: 12196 - DNA, 20 bp, synthetic construct
  source 1..20: mol_type = other DNA
tgcacgaacgctgcaagttg

SEQ ID NO: 12197 - DNA, 20 bp, synthetic construct
  source 1..20: mol_type = other DNA
acaatccgttcacgatattg

SEQ ID NO: 12198 - DNA, 20 bp, synthetic construct
  source 1..20: mol_type = other DNA
caatccgttcacgatattga

SEQ ID NO: 12199 - DNA, 20 bp, synthetic construct
  source 1..20: mol_type = other DNA
tctctcgaacgaagcagcat

SEQ ID NO: 12200 - DNA, 20 bp, synthetic construct
  source 1..20: mol_type = other DNA
ctctcgaacgaagcagcata

SEQ ID NO: 12201 - DNA, 20 bp, synthetic construct
  source 1..20: mol_type = other DNA
tctcgaacgaagcagcatag

SEQ ID NO: 12202 - DNA, 20 bp, synthetic construct
  source 1..20: mol_type = other DNA
cgcatgtgcctggtataatg

SEQ ID NO: 12203 - DNA, 20 bp, synthetic construct
  source 1..20: mol_type = other DNA
gagcgtcatgagccgcgttg

SEQ ID NO: 12204 - DNA, 20 bp, synthetic construct
  source 1..20: mol_type = other DNA
aagagttcgggtcccgttaa

SEQ ID NO: 12205 - DNA, 20 bp, synthetic construct
  source 1..20: mol_type = other DNA
ttcgggtcccgttaatgggc

SEQ ID NO: 12206 - DNA, 20 bp, synthetic construct
  source 1..20: mol_type = other DNA
atgaacaaactgcacgccat

SEQ ID NO: 12207 - DNA, 20 bp, synthetic construct
  source 1..20: mol_type = other DNA
ctacatgcattataacaagc

SEQ ID NO: 12208 - DNA, 20 bp, synthetic construct
  source 1..20: mol_type = other DNA
cgcaacggcgaactcattga

SEQ ID NO: 12209 - DNA, 20 bp, synthetic construct
  source 1..20: mol_type = other DNA
gcgtagatatgggccgcagc

SEQ ID NO: 12210 - DNA, 20 bp, synthetic construct
  source 1..20: mol_type = other DNA
ctgaactacgtgcgcaacgc

SEQ ID NO: 12211 - DNA, 20 bp, synthetic construct
  source 1..20: mol_type = other DNA
cgccggattcacagtgtcca

SEQ ID NO: 12212 - DNA, 20 bp, synthetic construct
  source 1..20: mol_type = other DNA
ggccgacatgctcctaaccc

SEQ ID NO: 12213 - DNA, 20 bp, synthetic construct
  source 1..20: mol_type = other DNA
taaactgctgcttgagtcgg

SEQ ID NO: 12214 - DNA, 20 bp, synthetic construct
  source 1..20: mol_type = other DNA
ataaacaaccggctgcttca

SEQ ID NO: 12215 - DNA, 20 bp, synthetic construct
  source 1..20: mol_type = other DNA
tccattaatccggaaaccaa

SEQ ID NO: 12216 - DNA, 20 bp, synthetic construct
  source 1..20: mol_type = other DNA
caatatgattcacatcatgg

SEQ ID NO: 12217 - DNA, 20 bp, synthetic construct
  source 1..20: mol_type = other DNA
attcacatcatggcgggcat

SEQ ID NO: 12218 - DNA, 20 bp, synthetic construct
  source 1..20: mol_type = other DNA
atctgcaacagctatattgc

SEQ ID NO: 12219 - DNA, 20 bp, synthetic construct
  source 1..20: mol_type = other DNA
gccaaccgtaaagccatctt

SEQ ID NO: 12220 - DNA, 20 bp, synthetic construct
  source 1..20: mol_type = other DNA
tattgtggattattaccgac

SEQ ID NO: 12221 - DNA, 20 bp, synthetic construct
  source 1..20: mol_type = other DNA
cgtcttgtgcagcagttgta

SEQ ID NO: 12222 - DNA, 20 bp, synthetic construct
  source 1..20: mol_type = other DNA
tgtgcagcagttgtacggag

SEQ ID NO: 12223 - DNA, 20 bp, synthetic construct
  source 1..20: mol_type = other DNA
cacgccagctcgaaaccgta

SEQ ID NO: 12224 - DNA, 20 bp, synthetic construct
  source 1..20: mol_type = other DNA
aaccatcatgctgtcggacc

SEQ ID NO: 12225 - DNA, 20 bp, synthetic construct
  source 1..20: mol_type = other DNA
gaggacaaattcaagtacac

SEQ ID NO: 12226 - DNA, 20 bp, synthetic construct
  source 1..20: mol_type = other DNA
aggacaaattcaagtacacc

SEQ ID NO: 12227 - DNA, 20 bp, synthetic construct
  source 1..20: mol_type = other DNA
tagacaggtgccggtaaacg

SEQ ID NO: 12228 - DNA, 20 bp, synthetic construct
  source 1..20: mol_type = other DNA
catgcttattcgcatcgaac

SEQ ID NO: 12229 - DNA, 20 bp, synthetic construct
  source 1..20: mol_type = other DNA
cgagcagatgagtgccatcc

SEQ ID NO: 12230 - DNA, 20 bp, synthetic construct
  source 1..20: mol_type = other DNA
gtgccatcctggacctcata

SEQ ID NO: 12231 - DNA, 20 bp, synthetic construct
  source 1..20: mol_type = other DNA
aagtcttattaactacggtg

SEQ ID NO: 12232 - DNA, 20 bp, synthetic construct
  source 1..20: mol_type = other DNA
tcttattaactacggtgagg

SEQ ID NO: 12233 - DNA, 20 bp, synthetic construct
  source 1..20: mol_type = other DNA
tattaactacggtgaggcgg

SEQ ID NO: 12234 - DNA, 20 bp, synthetic construct
  source 1..20: mol_type = other DNA
attaactacggtgaggcggt

SEQ ID NO: 12235 - DNA, 20 bp, synthetic construct
  source 1..20: mol_type = other DNA
cggtgaggcggtgggaatcc

SEQ ID NO: 12236 - DNA, 20 bp, synthetic construct
  source 1..20: mol_type = other DNA
tgaggcggtgggaatcctgg

SEQ ID NO: 12237 - DNA, 20 bp, synthetic construct
  source 1..20: mol_type = other DNA
acccttgacgcaatatatgc

SEQ ID NO: 12238 - DNA, 20 bp, synthetic construct
  source 1..20: mol_type = other DNA
atatgctggactcccaccac

SEQ ID NO: 12239 - DNA, 20 bp, synthetic construct
  source 1..20: mol_type = other DNA
ggactcccaccaccggtccg

SEQ ID NO: 12240 - DNA, 20 bp, synthetic construct
  source 1..20: mol_type = other DNA
cccaccaccggtccgtggcc

SEQ ID NO: 12241 - DNA, 20 bp, synthetic construct
  source 1..20: mol_type = other DNA
caccaccggtccgtggccgg

SEQ ID NO: 12242 - DNA, 20 bp, synthetic construct
  source 1..20: mol_type = other DNA
ccaacaagtcgggaattgtg

SEQ ID NO: 12243 - DNA, 20 bp, synthetic construct
  source 1..20: mol_type = other DNA
acgtctaaagaacccggaag

SEQ ID NO: 12244 - DNA, 20 bp, synthetic construct
  source 1..20: mol_type = other DNA
tagagcttataacgttcgaa

SEQ ID NO: 12245 - DNA, 20 bp, synthetic construct
  source 1..20: mol_type = other DNA
tgcaaactggtgtatccgct

SEQ ID NO: 12246 - DNA, 20 bp, synthetic construct
  source 1..20: mol_type = other DNA
cacctacatcatgcattctg

SEQ ID NO: 12247 - DNA, 20 bp, synthetic construct
  source 1..20: mol_type = other DNA
tcattattcgcatatatcta

SEQ ID NO: 12248 - DNA, 20 bp, synthetic construct
  source 1..20: mol_type = other DNA
cattattcgcatatatctac

SEQ ID NO: 12249 - DNA, 20 bp, synthetic construct
  source 1..20: mol_type = other DNA
acgcagtactaatacccgaa

SEQ ID NO: 12250 - DNA, 20 bp, synthetic construct
  source 1..20: mol_type = other DNA
ctattaaatagcacgattag

SEQ ID NO: 12251 - DNA, 20 bp, synthetic construct
  source 1..20: mol_type = other DNA
agcacgattagaggaatacc

SEQ ID NO: 12252 - DNA, 20 bp, synthetic construct
  source 1..20: mol_type = other DNA
taagcttatgcgccaccgtg

SEQ ID NO: 12253 - DNA, 20 bp, synthetic construct
  source 1..20: mol_type = other DNA
cgccaccgtgtggatgccca

SEQ ID NO: 12254 - DNA, 20 bp, synthetic construct
  source 1..20: mol_type = other DNA
accatcgtgtcgtcctctat

SEQ ID NO: 12255 - DNA, 20 bp, synthetic construct
  source 1..20: mol_type = other DNA
agtgaaattagaacggttat

SEQ ID NO: 12256 - DNA, 20 bp, synthetic construct
  source 1..20: mol_type = other DNA
gtgaaattagaacggttatg

SEQ ID NO: 12257 - DNA, 20 bp, synthetic construct
  source 1..20: mol_type = other DNA
tgaaattagaacggttatgg

SEQ ID NO: 12258 - DNA, 20 bp, synthetic construct
  source 1..20: mol_type = other DNA
gcagatctcatgacaagaac

SEQ ID NO: 12259 - DNA, 20 bp, synthetic construct
  source 1..20: mol_type = other DNA
tctcatgacaagaacgggac

SEQ ID NO: 12260 - DNA, 20 bp, synthetic construct
  source 1..20: mol_type = other DNA
ttccaacgtgttgttgcgaa

SEQ ID NO: 12261 - DNA, 20 bp, synthetic construct
  source 1..20: mol_type = other DNA
tattgccgcgcctaccctta

SEQ ID NO: 12262 - DNA, 20 bp, synthetic construct
  source 1..20: mol_type = other DNA
attgccgcgcctacccttat

SEQ ID NO: 12263 - DNA, 20 bp, synthetic construct
  source 1..20: mol_type = other DNA
atgggctctgttcctcgcat

SEQ ID NO: 12264 - DNA, 20 bp, synthetic construct
  source 1..20: mol_type = other DNA
tgggctctgttcctcgcata

SEQ ID NO: 12265 - DNA, 20 bp, synthetic construct
  source 1..20: mol_type = other DNA
catgtactctgacatcatta

SEQ ID NO: 12266 - DNA, 20 bp, synthetic construct
  source 1..20: mol_type = other DNA
cctgcccaacattcgcataa

SEQ ID NO: 12267 - DNA, 20 bp, synthetic construct
  source 1..20: mol_type = other DNA
ctgcccaacattcgcataaa

SEQ ID NO: 12268 - DNA, 20 bp, synthetic construct
  source 1..20: mol_type = other DNA
cttatgaatattatccggat

SEQ ID NO: 12269 - DNA, 20 bp, synthetic construct
  source 1..20: mol_type = other DNA
cggtgttagtatacttgtag

SEQ ID NO: 12270 - DNA, 20 bp, synthetic construct
  source 1..20: mol_type = other DNA
ggtgttagtatacttgtagc

SEQ ID NO: 12271 - DNA, 20 bp, synthetic construct
  source 1..20: mol_type = other DNA
ttaatacgaatgcgtgcgat

SEQ ID NO: 12272 - DNA, 20 bp, synthetic construct
  source 1..20: mol_type = other DNA
cgaatgcgtgcgataggatt

SEQ ID NO: 12273 - DNA, 20 bp, synthetic construct
  source 1..20: mol_type = other DNA
cgtgcgataggattcggcaa

SEQ ID NO: 12274 - DNA, 20 bp, synthetic construct
  source 1..20: mol_type = other DNA
gtgagaccatcatcttccaa

SEQ ID NO: 12275 - DNA, 20 bp, synthetic construct
  source 1..20: mol_type = other DNA
agaccatcatcttccaacgg

SEQ ID NO: 12276 - DNA, 20 bp, synthetic construct
  source 1..20: mol_type = other DNA
tataacctcttcatcggtac

SEQ ID NO: 12277 - DNA, 20 bp, synthetic construct
  source 1..20: mol_type = other DNA
ataacctcttcatcggtact

SEQ ID NO: 12278 - DNA, 20 bp, synthetic construct
  source 1..20: mol_type = other DNA
ttcatcggtactgggaggaa

SEQ ID NO: 12279 - DNA, 20 bp, synthetic construct
  source 1..20: mol_type = other DNA
ttgcttgttgcaatgcttgt

SEQ ID NO: 12280 - DNA, 20 bp, synthetic construct
  source 1..20: mol_type = other DNA
gtgcgacaacacacccgcat

SEQ ID NO: 12281 - DNA, 20 bp, synthetic construct
  source 1..20: mol_type = other DNA
tgcgacaacacacccgcatt

SEQ ID NO: 12282 - DNA, 20 bp, synthetic construct
  source 1..20: mol_type = other DNA
attgccgcgtaggttccaat

SEQ ID NO: 12283 - DNA, 20 bp, synthetic construct
  source 1..20: mol_type = other DNA
agtgtagccgtgttggaact

SEQ ID NO: 12284 - DNA, 20 bp, synthetic construct
  source 1..20: mol_type = other DNA
aactaggtctgtaaggctac

SEQ ID NO: 12285 - DNA, 20 bp, synthetic construct
  source 1..20: mol_type = other DNA
ggtctgtaaggctactggtt

SEQ ID NO: 12286 - DNA, 20 bp, synthetic construct
  source 1..20: mol_type = other DNA
aaagtcagtactgttgataa

SEQ ID NO: 12287 - DNA, 20 bp, synthetic construct
  source 1..20: mol_type = other DNA
atcattgggcgcaatatctc

SEQ ID NO: 12288 - DNA, 20 bp, synthetic construct
  source 1..20: mol_type = other DNA
attgggcgcaatatctccgg

SEQ ID NO: 12289 - DNA, 20 bp, synthetic construct
  source 1..20: mol_type = other DNA
tgcttatcgccgtacatagc

SEQ ID NO: 12290 - DNA, 20 bp, synthetic construct
  source 1..20: mol_type = other DNA
tgggttgatccatcaacgtg

SEQ ID NO: 12291 - DNA, 20 bp, synthetic construct
  source 1..20: mol_type = other DNA
ccagaaacgcagtgcgttga

SEQ ID NO: 12292 - DNA, 20 bp, synthetic construct
  source 1..20: mol_type = other DNA
aatagggccgtaatgtcgta

SEQ ID NO: 12293 - DNA, 20 bp, synthetic construct
  source 1..20: mol_type = other DNA
gccgtaatgtcgtatggtat

SEQ ID NO: 12294 - DNA, 20 bp, synthetic construct
  source 1..20: mol_type = other DNA
cattataggcctgcacgact

SEQ ID NO: 12295 - DNA, 20 bp, synthetic construct
  source 1..20: mol_type = other DNA
taggcctgcacgactaggtt

SEQ ID NO: 12296 - DNA, 20 bp, synthetic construct
  source 1..20: mol_type = other DNA
aggtgttgtaaccttattga

SEQ ID NO: 12297 - DNA, 20 bp, synthetic construct
  source 1..20: mol_type = other DNA
agtacgcacgtgattggtat

SEQ ID NO: 12298 - DNA, 20 bp, synthetic construct
  source 1..20: mol_type = other DNA
tcgggatccgaataacatat

SEQ ID NO: 12299 - DNA, 20 bp, synthetic construct
  source 1..20: mol_type = other DNA
cacctccttagtagccgaat

SEQ ID NO: 12300 - DNA, 20 bp, synthetic construct
  source 1..20: mol_type = other DNA
cgaatcggctatgtccataa

SEQ ID NO: 12301 - DNA, 20 bp, synthetic construct
  source 1..20: mol_type = other DNA
cggctatgtccataaaggtt

SEQ ID NO: 12302 - DNA, 20 bp, synthetic construct
  source 1..20: mol_type = other DNA
tctgtaccattccatccggt

SEQ ID NO: 12303 - DNA, 20 bp, synthetic construct
  source 1..20: mol_type = other DNA
cggcagtaccttaataaact

SEQ ID NO: 12304 - DNA, 20 bp, synthetic construct
  source 1..20: mol_type = other DNA
agtaccttaataaactcggt

SEQ ID NO: 12305 - DNA, 20 bp, synthetic construct
  source 1..20: mol_type = other DNA
ttgacgcatacagtcatcaa

SEQ ID NO: 12306 - DNA, 20 bp, synthetic construct
  source 1..20: mol_type = other DNA
tcaatggcaatacgcgtgcg

SEQ ID NO: 12307 - DNA, 20 bp, synthetic construct
  source 1..20: mol_type = other DNA
atacgcgtgcgcggagtata

SEQ ID NO: 12308 - DNA, 20 bp, synthetic construct
  source 1..20: mol_type = other DNA
gtatacggcgagatatgctt

SEQ ID NO: 12309 - DNA, 20 bp, synthetic construct
  source 1..20: mol_type = other DNA
ggcgagatatgcttaggaac

SEQ ID NO: 12310 - DNA, 20 bp, synthetic construct
  source 1..20: mol_type = other DNA
gagatatgcttaggaaccgg

SEQ ID NO: 12311 - DNA, 20 bp, synthetic construct
  source 1..20: mol_type = other DNA
agatatgcttaggaaccggc

SEQ ID NO: 12312 - DNA, 20 bp, synthetic construct
  source 1..20: mol_type = other DNA
ccatgatccagaccgctagt

SEQ ID NO: 12313 - DNA, 20 bp, synthetic construct
  source 1..20: mol_type = other DNA
cagaccgctagtcggcgatc

SEQ ID NO: 12314 - DNA, 20 bp, synthetic construct
  source 1..20: mol_type = other DNA
cgctagtcggcgatcaggaa

SEQ ID NO: 12315 - DNA, 20 bp, synthetic construct
  source 1..20: mol_type = other DNA
gctagtcggcgatcaggaaa

SEQ ID NO: 12316 - DNA, 20 bp, synthetic construct
  source 1..20: mol_type = other DNA
aaatctgctcatatatatgc

SEQ ID NO: 12317 - DNA, 20 bp, synthetic construct
  source 1..20: mol_type = other DNA
ctcatatatatgcagggcaa

SEQ ID NO: 12318 - DNA, 20 bp, synthetic construct
  source 1..20: mol_type = other DNA
gcaagggtatactgaacatc

SEQ ID NO: 12319 - DNA, 20 bp, synthetic construct
  source 1..20: mol_type = other DNA
acatattgaacaatatggaa

SEQ ID NO: 12320 - DNA, 20 bp, synthetic construct
  source 1..20: mol_type = other DNA
atcgagtaaagcaaagctgc

SEQ ID NO: 12321 - DNA, 20 bp, synthetic construct
  source 1..20: mol_type = other DNA
caactgcccgatcctcgagc

SEQ ID NO: 12322 - DNA, 20 bp, synthetic construct
  source 1..20: mol_type = other DNA
gattgcagacgccattaacc

SEQ ID NO: 12323 - DNA, 20 bp, synthetic construct
  source 1..20: mol_type = other DNA
aagctcatagataccaccga

SEQ ID NO: 12324 - DNA, 20 bp, synthetic construct
  source 1..20: mol_type = other DNA
agctcatagataccaccgat

SEQ ID NO: 12325 - DNA, 20 bp, synthetic construct
  source 1..20: mol_type = other DNA
gctcatagataccaccgatg

SEQ ID NO: 12326 - DNA, 20 bp, synthetic construct
  source 1..20: mol_type = other DNA
cctaactcatggactgcgcg

SEQ ID NO: 12327 - DNA, 20 bp, synthetic construct
  source 1..20: mol_type = other DNA
gcggaatatcttgatgtaca

SEQ ID NO: 12328 - DNA, 20 bp, synthetic construct
  source 1..20: mol_type = other DNA
taagcaacttcacgagcgca

SEQ ID NO: 12329 - DNA, 20 bp, synthetic construct
  source 1..20: mol_type = other DNA
acttcacgagcgcatggtga

SEQ ID NO: 12330 - DNA, 20 bp, synthetic construct
  source 1..20: mol_type = other DNA
tcacgagcgcatggtgacgg

SEQ ID NO: 12331 - DNA, 20 bp, synthetic construct
  source 1..20: mol_type = other DNA
tgataaactgcagacggatg

SEQ ID NO: 12332 - DNA, 20 bp, synthetic construct
  source 1..20: mol_type = other DNA
gaggattgaagcgcaaagac

SEQ ID NO: 12333 - DNA, 20 bp, synthetic construct
  source 1..20: mol_type = other DNA
ccttgacgccgaacataacg

SEQ ID NO: 12334 - DNA, 20 bp, synthetic construct
  source 1..20: mol_type = other DNA
gcgcttgatctaagtcttat

SEQ ID NO: 12335 - DNA, 20 bp, synthetic construct
  source 1..20: mol_type = other DNA
cagcaaggccgcgcggtcgc

SEQ ID NO: 12336 - DNA, 20 bp, synthetic construct
  source 1..20: mol_type = other DNA
gtcgcaggttgacctcaacc

SEQ ID NO: 12337 - DNA, 20 bp, synthetic construct
  source 1..20: mol_type = other DNA
tgcgggacgcctcatgcagt

SEQ ID NO: 12338 - DNA, 20 bp, synthetic construct
  source 1..20: mol_type = other DNA
acgcctcatgcagttggata

SEQ ID NO: 12339 - DNA, 20 bp, synthetic construct
  source 1..20: mol_type = other DNA
aaatgcgcgcattaattctc

SEQ ID NO: 12340 - DNA, 20 bp, synthetic construct
  source 1..20: mol_type = other DNA
agatcttgccagaggacacg

SEQ ID NO: 12341 - DNA, 20 bp, synthetic construct
  source 1..20: mol_type = other DNA
gatcttgccagaggacacgt

SEQ ID NO: 12342 - DNA, 20 bp, synthetic construct
  source 1..20: mol_type = other DNA
ggacacgtgggcccaaaccc

SEQ ID NO: 12343 - DNA, 20 bp, synthetic construct
  source 1..20: mol_type = other DNA
cacgtgggcccaaaccctgg

SEQ ID NO: 12344 - DNA, 20 bp, synthetic construct
  source 1..20: mol_type = other DNA
agctgtaagcgccatcgagc

SEQ ID NO: 12345 - DNA, 20 bp, synthetic construct
  source 1..20: mol_type = other DNA
acgccgcttctatcgagctc

SEQ ID NO: 12346 - DNA, 20 bp, synthetic construct
  source 1..20: mol_type = other DNA
cgcttctatcgagctctgga

SEQ ID NO: 12347 - DNA, 20 bp, synthetic construct
  source 1..20: mol_type = other DNA
gcttctatcgagctctggaa

SEQ ID NO: 12348 - DNA, 20 bp, synthetic construct
  source 1..20: mol_type = other DNA
tcaaacagtccagcagatgt

SEQ ID NO: 12349 - DNA, 20 bp, synthetic construct
  source 1..20: mol_type = other DNA
ttggatggcgtgcgcattat

SEQ ID NO: 12350 - DNA, 20 bp, synthetic construct
  source 1..20: mol_type = other DNA
gcgtgcgcattataggacga

SEQ ID NO: 12351 - DNA, 20 bp, synthetic construct
  source 1..20: mol_type = other DNA
tataggacgatggttcaccg

SEQ ID NO: 12352 - DNA, 20 bp, synthetic construct
  source 1..20: mol_type = other DNA
cgatggttcaccgaggcaac

SEQ ID NO: 12353 - DNA, 20 bp, synthetic construct
  source 1..20: mol_type = other DNA
gatggttcaccgaggcaaca

SEQ ID NO: 12354 - DNA, 20 bp, synthetic construct
  source 1..20: mol_type = other DNA
atccaacaaggccgaagcgt

SEQ ID NO: 12355 - DNA, 20 bp, synthetic construct
  source 1..20: mol_type = other DNA
gcccggattggagacatgct

SEQ ID NO: 12356 - DNA, 20 bp, synthetic construct
  source 1..20: mol_type = other DNA
cccggattggagacatgctt

SEQ ID NO: 12357 - DNA, 20 bp, synthetic construct
  source 1..20: mol_type = other DNA
cggattggagacatgcttgg

SEQ ID NO: 12358 - DNA, 20 bp, synthetic construct
  source 1..20: mol_type = other DNA
agcgcttgcacgaactcccg

SEQ ID NO: 12359 - DNA, 20 bp, synthetic construct
  source 1..20: mol_type = other DNA
acgacgccctatcaacccgc

SEQ ID NO: 12360 - DNA, 20 bp, synthetic construct
  source 1..20: mol_type = other DNA
cgacgccctatcaacccgct

SEQ ID NO: 12361 - DNA, 20 bp, synthetic construct
  source 1..20: mol_type = other DNA
atcaacccgctgggaaaccg

SEQ ID NO: 12362 - DNA, 20 bp, synthetic construct
  source 1..20: mol_type = other DNA
tatacccacacgtatgatac

SEQ ID NO: 12363 - DNA, 20 bp, synthetic construct
  source 1..20: mol_type = other DNA
cgccgatgagctagaacctg

SEQ ID NO: 12364 - DNA, 20 bp, synthetic construct
  source 1..20: mol_type = other DNA
gatctcgatgcttcctgagc

SEQ ID NO: 12365 - DNA, 20 bp, synthetic construct
  source 1..20: mol_type = other DNA
tcgatgcttcctgagctgga

SEQ ID NO: 12366 - DNA, 20 bp, synthetic construct
  source 1..20: mol_type = other DNA
cctattgagcttattaacat

SEQ ID NO: 12367 - DNA, 20 bp, synthetic construct
  source 1..20: mol_type = other DNA
ttgtaaatgaaataaaccgc

SEQ ID NO: 12368 - DNA, 20 bp, synthetic construct
  source 1..20: mol_type = other DNA
gcgttatcacacgcactgaa

SEQ ID NO: 12369 - DNA, 20 bp, synthetic construct
  source 1..20: mol_type = other DNA
cgttatcacacgcactgaat

SEQ ID NO: 12370 - DNA, 20 bp, synthetic construct
  source 1..20: mol_type = other DNA
gcgcgaactatgaatgactt

SEQ ID NO: 12371 - DNA, 20 bp, synthetic construct
  source 1..20: mol_type = other DNA
cgcaattacttccctccgat

SEQ ID NO: 12372 - DNA, 20 bp, synthetic construct
  source 1..20: mol_type = other DNA
gactctgtggatgtccaaac

SEQ ID NO: 12373 - DNA, 20 bp, synthetic construct
  source 1..20: mol_type = other DNA
cccagcctacaacaagaatt

SEQ ID NO: 12374 - DNA, 20 bp, synthetic construct
  source 1..20: mol_type = other DNA
accgagccaatcttattgac

SEQ ID NO: 12375 - DNA, 20 bp, synthetic construct
  source 1..20: mol_type = other DNA
gccaatcttattgactggct

SEQ ID NO: 12376 - DNA, 20 bp, synthetic construct
  source 1..20: mol_type = other DNA
aaatccaggattggttgtta

SEQ ID NO: 12377 - DNA, 20 bp, synthetic construct
  source 1..20: mol_type = other DNA
tgcctggattgtaccatatg

SEQ ID NO: 12378 - DNA, 20 bp, synthetic construct
  source 1..20: mol_type = other DNA
gcctggattgtaccatatgt

SEQ ID NO: 12379 - DNA, 20 bp, synthetic construct
  source 1..20: mol_type = other DNA
agaattagccgcaagatatt

SEQ ID NO: 12380 - DNA, 20 bp, synthetic construct
  source 1..20: mol_type = other DNA
attaaaccacccaccgatgc

SEQ ID NO: 12381 - DNA, 20 bp, synthetic construct
  source 1..20: mol_type = other DNA
taaaccacccaccgatgccg

SEQ ID NO: 12382 - DNA, 20 bp, synthetic construct
  source 1..20: mol_type = other DNA
tcctggcggtgaattaggcc

SEQ ID NO: 12383 - DNA, 20 bp, synthetic construct
  source 1..20: mol_type = other DNA
tggcggtgaattaggcctgg

SEQ ID NO: 12384 - DNA, 20 bp, synthetic construct
  source 1..20: mol_type = other DNA
ggcggtgaattaggcctgga

SEQ ID NO: 12385 - DNA, 20 bp, synthetic construct
  source 1..20: mol_type = other DNA
tataatgtactgcaacttcg

SEQ ID NO: 12386 - DNA, 20 bp, synthetic construct
  source 1..20: mol_type = other DNA
aatgtactgcaacttcgagg

SEQ ID NO: 12387 - DNA, 20 bp, synthetic construct
  source 1..20: mol_type = other DNA
atgtactgcaacttcgaggt

SEQ ID NO: 12388 - DNA, 20 bp, synthetic construct
  source 1..20: mol_type = other DNA
tgtactgcaacttcgaggtg

SEQ ID NO: 12389 - DNA, 20 bp, synthetic construct
  source 1..20: mol_type = other DNA
tggactccgtgtagagcaag

SEQ ID NO: 12390 - DNA, 20 bp, synthetic construct
  source 1..20: mol_type = other DNA
cgtgtagagcaagtggtact

SEQ ID NO: 12391 - DNA, 20 bp, synthetic construct
  source 1..20: mol_type = other DNA
cttcgacgttatcgcctata

SEQ ID NO: 12392 - DNA, 20 bp, synthetic construct
  source 1..20: mol_type = other DNA
cgcctatatggatcagacta

SEQ ID NO: 12393 - DNA, 20 bp, synthetic construct
  source 1..20: mol_type = other DNA
ttgtagcctcgtacattgcc

SEQ ID NO: 12394 - DNA, 20 bp, synthetic construct
  source 1..20: mol_type = other DNA
ttatcaatgcattcgccaac

SEQ ID NO: 12395 - DNA, 20 bp, synthetic construct
  source 1..20: mol_type = other DNA
gcacgtgataacatcgcctt

SEQ ID NO: 12396 - DNA, 20 bp, synthetic construct
  source 1..20: mol_type = other DNA
catgcttcagcggcttatta

SEQ ID NO: 12397 - DNA, 20 bp, synthetic construct
  source 1..20: mol_type = other DNA
attaaggatactaaccgcca

SEQ ID NO: 12398 - DNA, 20 bp, synthetic construct
  source 1..20: mol_type = other DNA
tggctcgtcctaatctgatg

SEQ ID NO: 12399 - DNA, 20 bp, synthetic construct
  source 1..20: mol_type = other DNA
cctatgacaggactatccgt

SEQ ID NO: 12400 - DNA, 20 bp, synthetic construct
  source 1..20: mol_type = other DNA
gacaggactatccgtcggtc

SEQ ID NO: 12401 - DNA, 20 bp, synthetic construct
  source 1..20: mol_type = other DNA
aggactatccgtcggtcagg

SEQ ID NO: 12402 - DNA, 20 bp, synthetic construct
  source 1..20: mol_type = other DNA
cgatgttgtgcgaaagcgat

SEQ ID NO: 12403 - DNA, 20 bp, synthetic construct
  source 1..20: mol_type = other DNA
cgattggtcgcagtgatcga

SEQ ID NO: 12404 - DNA, 20 bp, synthetic construct
  source 1..20: mol_type = other DNA
gattggtcgcagtgatcgac

SEQ ID NO: 12405 - DNA, 20 bp, synthetic construct
  source 1..20: mol_type = other DNA
gtgatcgacgggatcattag

SEQ ID NO: 12406 - DNA, 20 bp, synthetic construct
  source 1..20: mol_type = other DNA
cattagaggctcccacactc

SEQ ID NO: 12407 - DNA, 20 bp, synthetic construct
  source 1..20: mol_type = other DNA
ctatatgtcccggtacaata

SEQ ID NO: 12408 - DNA, 20 bp, synthetic construct
  source 1..20: mol_type = other DNA
gataaacctattataacagc

SEQ ID NO: 12409 - DNA, 20 bp, synthetic construct
  source 1..20: mol_type = other DNA
cctattataacagcgggaat

SEQ ID NO: 12410 - DNA, 20 bp, synthetic construct
  source 1..20: mol_type = other DNA
ctattataacagcgggaata

SEQ ID NO: 12411 - DNA, 20 bp, synthetic construct
  source 1..20: mol_type = other DNA
cgtggaaagctcttaccaag

SEQ ID NO: 12412 - DNA, 20 bp, synthetic construct
  source 1..20: mol_type = other DNA
aaaggccaaacacgcactct

SEQ ID NO: 12413 - DNA, 20 bp, synthetic construct
  source 1..20: mol_type = other DNA
ggtacgatcgctaaacaccg

SEQ ID NO: 12414 - DNA, 20 bp, synthetic construct
  source 1..20: mol_type = other DNA
tggaaacgaattgatgagca

SEQ ID NO: 12415 - DNA, 20 bp, synthetic construct
  source 1..20: mol_type = other DNA
ggaaacgaattgatgagcaa

SEQ ID NO: 12416 - DNA, 20 bp, synthetic construct
  source 1..20: mol_type = other DNA
tgactatgatgaagcaggcc

SEQ ID NO: 12417 - DNA, 20 bp, synthetic construct
  source 1..20: mol_type = other DNA
gactatgatgaagcaggccc

SEQ ID NO: 12418 - DNA, 20 bp, synthetic construct
  source 1..20: mol_type = other DNA
ttggccgcaggtattcaacg

SEQ ID NO: 12419 - DNA, 20 bp, synthetic construct
  source 1..20: mol_type = other DNA
ttcaacgtggacgtgaacaa

SEQ ID NO: 12420 - DNA, 20 bp, synthetic construct
  source 1..20: mol_type = other DNA
caacgtggacgtgaacaatg

SEQ ID NO: 12421 - DNA, 20 bp, synthetic construct
  source 1..20: mol_type = other DNA
aacgtggacgtgaacaatgg

SEQ ID NO: 12422 - DNA, 20 bp, synthetic construct
  source 1..20: mol_type = other DNA
ggacacagcaataccgagct

SEQ ID NO: 12423 - DNA, 20 bp, synthetic construct
  source 1..20: mol_type = other DNA
ctgatgatgaagcgactcaa

SEQ ID NO: 12424 - DNA, 20 bp, synthetic construct
  source 1..20: mol_type = other DNA
tgcacgagcacccgttcgta

SEQ ID NO: 12425 - DNA, 20 bp, synthetic construct
  source 1..20: mol_type = other DNA
ctggtccatcgttaaacaag

SEQ ID NO: 12426 - DNA, 20 bp, synthetic construct
  source 1..20: mol_type = other DNA
tggtccatcgttaaacaagt

SEQ ID NO: 12427 - DNA, 20 bp, synthetic construct
  source 1..20: mol_type = other DNA
aagcccaccttagtacaaat

SEQ ID NO: 12428 - DNA, 20 bp, synthetic construct
  source 1..20: mol_type = other DNA
gagtacgggttctccatcac

SEQ ID NO: 12429 - DNA, 20 bp, synthetic construct
  source 1..20: mol_type = other DNA
gaagacagatctagaacccg

SEQ ID NO: 12430 - DNA, 20 bp, synthetic construct
  source 1..20: mol_type = other DNA
tggcaaatcataagggtcat

SEQ ID NO: 12431 - DNA, 20 bp, synthetic construct
  source 1..20: mol_type = other DNA
gaaataaagtcgtagcaaga

SEQ ID NO: 12432 - DNA, 20 bp, synthetic construct
  source 1..20: mol_type = other DNA
cgcatcagcgcattgccggc

SEQ ID NO: 12433 - DNA, 20 bp, synthetic construct
  source 1..20: mol_type = other DNA
gcatcagcgcattgccggct

SEQ ID NO: 12434 - DNA, 20 bp, synthetic construct
  source 1..20: mol_type = other DNA
ttgccggctgggttgccagc

SEQ ID NO: 12435 - DNA, 20 bp, synthetic construct
  source 1..20: mol_type = other DNA
gttgccagctggattaccag

SEQ ID NO: 12436 - DNA, 20 bp, synthetic construct
  source 1..20: mol_type = other DNA
attaccagcgggcttaccag

SEQ ID NO: 12437 - DNA, 20 bp, synthetic construct
  source 1..20: mol_type = other DNA
ctcagcaaattgcgatgctg

SEQ ID NO: 12438 - DNA, 20 bp, synthetic construct
  source 1..20: mol_type = other DNA
gcatgcgagacataaagatt

SEQ ID NO: 12439 - DNA, 20 bp, synthetic construct
  source 1..20: mol_type = other DNA
gcttaatgatatctattccg

SEQ ID NO: 12440 - DNA, 20 bp, synthetic construct
  source 1..20: mol_type = other DNA
aggaaagagtacttcctcgt

SEQ ID NO: 12441 - DNA, 20 bp, synthetic construct
  source 1..20: mol_type = other DNA
cttcctcgtaggccatacgt

SEQ ID NO: 12442 - DNA, 20 bp, synthetic construct
  source 1..20: mol_type = other DNA
gtaggccatacgtaggtaac

SEQ ID NO: 12443 - DNA, 20 bp, synthetic construct
  source 1..20: mol_type = other DNA
tggtgccattatcttgccgc

SEQ ID NO: 12444 - DNA, 20 bp, synthetic construct
  source 1..20: mol_type = other DNA
ccgcaggtattcattcacct

SEQ ID NO: 12445 - DNA, 20 bp, synthetic construct
  source 1..20: mol_type = other DNA
cctctgtataaagactatct

SEQ ID NO: 12446 - DNA, 20 bp, synthetic construct
  source 1..20: mol_type = other DNA
acccgaactggtgactcctc

SEQ ID NO: 12447 - DNA, 20 bp, synthetic construct
  source 1..20: mol_type = other DNA
ctggtgactcctccggctag

SEQ ID NO: 12448 - DNA, 20 bp, synthetic construct
  source 1..20: mol_type = other DNA
gcttcgcgtctaccatggca

SEQ ID NO: 12449 - DNA, 20 bp, synthetic construct
  source 1..20: mol_type = other DNA
tagttccttaaacccaggat

SEQ ID NO: 12450 - DNA, 20 bp, synthetic construct
  source 1..20: mol_type = other DNA
gagacgattgttaaagtgaa

SEQ ID NO: 12451 - DNA, 20 bp, synthetic construct
  source 1..20: mol_type = other DNA
gtagtgaagagattcaccct

SEQ ID NO: 12452 - DNA, 20 bp, synthetic construct
  source 1..20: mol_type = other DNA
gttgtaggccatgatgagtg

SEQ ID NO: 12453 - DNA, 20 bp, synthetic construct
  source 1..20: mol_type = other DNA
gtactcatcatggatagcat

SEQ ID NO: 12454 - DNA, 20 bp, synthetic construct
  source 1..20: mol_type = other DNA
gattcctacctctctgcgat

SEQ ID NO: 12455 - DNA, 20 bp, synthetic construct
  source 1..20: mol_type = other DNA
attcctacctctctgcgatc

SEQ ID NO: 12456 - DNA, 20 bp, synthetic construct
  source 1..20: mol_type = other DNA
aatgcagtagtaggccacgt

SEQ ID NO: 12457 - DNA, 20 bp, synthetic construct
  source 1..20: mol_type = other DNA
cataatacttccacatgaga

SEQ ID NO: 12458 - DNA, 20 bp, synthetic construct
  source 1..20: mol_type = other DNA
acacatgttgcggacatcaa

SEQ ID NO: 12459 - DNA, 20 bp, synthetic construct
  source 1..20: mol_type = other DNA
tgttgcggacatcaatgggt

SEQ ID NO: 12460 - DNA, 20 bp, synthetic construct
  source 1..20: mol_type = other DNA
acatcaatgggtaggcatcc

SEQ ID NO: 12461 - DNA, 20 bp, synthetic construct
  source 1..20: mol_type = other DNA
atcaatgggtaggcatccag

SEQ ID NO: 12462 - DNA, 20 bp, synthetic construct
  source 1..20: mol_type = other DNA
tagaatggtggtccactctg

SEQ ID NO: 12463 - DNA, 20 bp, synthetic construct
  source 1..20: mol_type = other DNA
gtgatgcacgtgctcgctag

SEQ ID NO: 12464 - DNA, 20 bp, synthetic construct
  source 1..20: mol_type = other DNA
tccggaacggttcccttaac

SEQ ID NO: 12465 - DNA, 20 bp, synthetic construct
  source 1..20: mol_type = other DNA
ccggaacggttcccttaaca

SEQ ID NO: 12466 - DNA, 20 bp, synthetic construct
  source 1..20: mol_type = other DNA
ggttcccttaacagggctat

SEQ ID NO: 12467 - DNA, 20 bp, synthetic construct
  source 1..20: mol_type = other DNA
gctataggtctctatatcgt

SEQ ID NO: 12468 - DNA, 20 bp, synthetic construct
  source 1..20: mol_type = other DNA
cgtaggccataacgatgctg

SEQ ID NO: 12469 - DNA, 20 bp, synthetic construct
  source 1..20: mol_type = other DNA
cataacgatgctgtggtctg

SEQ ID NO: 12470 - DNA, 20 bp, synthetic construct
  source 1..20: mol_type = other DNA
ataacgatgctgtggtctgt

SEQ ID NO: 12471 - DNA, 20 bp, synthetic construct
  source 1..20: mol_type = other DNA
taacgatgctgtggtctgtg

SEQ ID NO: 12472 - DNA, 20 bp, synthetic construct
  source 1..20: mol_type = other DNA
aacctgtgtaccaagccgcg

SEQ ID NO: 12473 - DNA, 20 bp, synthetic construct
  source 1..20: mol_type = other DNA
taccaagccgcgaggctcgt

SEQ ID NO: 12474 - DNA, 20 bp, synthetic construct
  source 1..20: mol_type = other DNA
agctgtatccaacttgtaag

SEQ ID NO: 12475 - DNA, 20 bp, synthetic construct
  source 1..20: mol_type = other DNA
ttagctctcgggaaaccatt

SEQ ID NO: 12476 - DNA, 20 bp, synthetic construct
  source 1..20: mol_type = other DNA
ggaaaccattcggtagtaac

SEQ ID NO: 12477 - DNA, 20 bp, synthetic construct
  source 1..20: mol_type = other DNA
gtaacaggttgtgtcgtccg

SEQ ID NO: 12478 - DNA, 20 bp, synthetic construct
  source 1..20: mol_type = other DNA
acaggttgtgtcgtccgcgg

SEQ ID NO: 12479 - DNA, 20 bp, synthetic construct
  source 1..20: mol_type = other DNA
aggctccatatcgtacttca

SEQ ID NO: 12480 - DNA, 20 bp, synthetic construct
  source 1..20: mol_type = other DNA
tcgtacttcatggatatcaa

SEQ ID NO: 12481 - DNA, 20 bp, synthetic construct
  source 1..20: mol_type = other DNA
cgtacttcatggatatcaat

SEQ ID NO: 12482 - DNA, 20 bp, synthetic construct
  source 1..20: mol_type = other DNA
catgaatagtagaggagcat

SEQ ID NO: 12483 - DNA, 20 bp, synthetic construct
  source 1..20: mol_type = other DNA
gtaactcgttgggtaatcac

SEQ ID NO: 12484 - DNA, 20 bp, synthetic construct
  source 1..20: mol_type = other DNA
taactcgttgggtaatcacc

SEQ ID NO: 12485 - DNA, 20 bp, synthetic construct
  source 1..20: mol_type = other DNA
cccgtgcaacaatctcagaa

SEQ ID NO: 12486 - DNA, 20 bp, synthetic construct
  source 1..20: mol_type = other DNA
cgtgcctgcaaatgtgttac

SEQ ID NO: 12487 - DNA, 20 bp, synthetic construct
  source 1..20: mol_type = other DNA
acgtatcgcctattgttaag

SEQ ID NO: 12488 - DNA, 20 bp, synthetic construct
  source 1..20: mol_type = other DNA
cgcctattgttaagcggtag

SEQ ID NO: 12489 - DNA, 20 bp, synthetic construct
  source 1..20: mol_type = other DNA
gcctattgttaagcggtagc

SEQ ID NO: 12490 - DNA, 20 bp, synthetic construct
  source 1..20: mol_type = other DNA
cctattgttaagcggtagcg

SEQ ID NO: 12491 - DNA, 20 bp, synthetic construct
  source 1..20: mol_type = other DNA
gctgaacatcgacgcatcta

SEQ ID NO: 12492 - DNA, 20 bp, synthetic construct
  source 1..20: mol_type = other DNA
ggcagacctcaacacgctag

SEQ ID NO: 12493 - DNA, 20 bp, synthetic construct
  source 1..20: mol_type = other DNA
cggcacgttagccgtcacct

SEQ ID NO: 12494 - DNA, 20 bp, synthetic construct
  source 1..20: mol_type = other DNA
caaacaccacataacttcca

SEQ ID NO: 12495 - DNA, 20 bp, synthetic construct
  source 1..20: mol_type = other DNA
attcatacgattaatgatat

SEQ ID NO: 12496 - DNA, 20 bp, synthetic construct
  source 1..20: mol_type = other DNA
ttcatacgattaatgatatg

SEQ ID NO: 12497 - DNA, 20 bp, synthetic construct
  source 1..20: mol_type = other DNA
tggcgggaatacgagcaagc

SEQ ID NO: 12498 - DNA, 20 bp, synthetic construct
  source 1..20: mol_type = other DNA
ttgacgcaaatgttgcggcc

SEQ ID NO: 12499 - DNA, 20 bp, synthetic construct
  source 1..20: mol_type = other DNA
acgcaaatgttgcggcccgg

SEQ ID NO: 12500 - DNA, 20 bp, synthetic construct
  source 1..20: mol_type = other DNA
cgcaaatgttgcggcccggt

SEQ ID NO: 12501 - DNA, 20 bp, synthetic construct
  source 1..20: mol_type = other DNA
gcccggtgggaaacaatcta

SEQ ID NO: 12502 - DNA, 20 bp, synthetic construct
  source 1..20: mol_type = other DNA
cggtgggaaacaatctacgg

SEQ ID NO: 12503 - DNA, 20 bp, synthetic construct
  source 1..20: mol_type = other DNA
gcaacattcgcatctaccat

SEQ ID NO: 12504 - DNA, 20 bp, synthetic construct
  source 1..20: mol_type = other DNA
caacattcgcatctaccata

SEQ ID NO: 12505 - DNA, 20 bp, synthetic construct
  source 1..20: mol_type = other DNA
cctgcgcaagtacgacacgc

SEQ ID NO: 12506 - DNA, 20 bp, synthetic construct
  source 1..20: mol_type = other DNA
caagtacgacacgcaggcaa

SEQ ID NO: 12507 - DNA, 20 bp, synthetic construct
  source 1..20: mol_type = other DNA
catgccgccagccaagcgca

SEQ ID NO: 12508 - DNA, 20 bp, synthetic construct
  source 1..20: mol_type = other DNA
tcgcgtcataccttgtccta

SEQ ID NO: 12509 - DNA, 20 bp, synthetic construct
  source 1..20: mol_type = other DNA
tgcttcagtgggacaccaca

SEQ ID NO: 12510 - DNA, 20 bp, synthetic construct
  source 1..20: mol_type = other DNA
tcagtgggacaccacatggc

SEQ ID NO: 12511 - DNA, 20 bp, synthetic construct
  source 1..20: mol_type = other DNA
taccgaagatgaccctgtga

SEQ ID NO: 12512 - DNA, 20 bp, synthetic construct
  source 1..20: mol_type = other DNA
tatgtgtaaggataactggt

SEQ ID NO: 12513 - DNA, 20 bp, synthetic construct
  source 1..20: mol_type = other DNA
aacattcccggctacacggt

SEQ ID NO: 12514 - DNA, 20 bp, synthetic construct
  source 1..20: mol_type = other DNA
gtacgaaatcgtaccctcag

SEQ ID NO: 12515 - DNA, 20 bp, synthetic construct
  source 1..20: mol_type = other DNA
aacattgactattgatccta

SEQ ID NO: 12516 - DNA, 20 bp, synthetic construct
  source 1..20: mol_type = other DNA
gatattgaaaccatcgaccg

SEQ ID NO: 12517 - DNA, 20 bp, synthetic construct
  source 1..20: mol_type = other DNA
ttatattcacattctcgcgg

SEQ ID NO: 12518 - DNA, 20 bp, synthetic construct
  source 1..20: mol_type = other DNA
tcacgtatgggatatggagt

SEQ ID NO: 12519 - DNA, 20 bp, synthetic construct
  source 1..20: mol_type = other DNA
cacgtatgggatatggagta

SEQ ID NO: 12520 - DNA, 20 bp, synthetic construct
  source 1..20: mol_type = other DNA
ttaaagattcgtagcccggt

SEQ ID NO: 12521 - DNA, 20 bp, synthetic construct
  source 1..20: mol_type = other DNA
attcgtagcccggtaggcac

SEQ ID NO: 12522 - DNA, 20 bp, synthetic construct
  source 1..20: mol_type = other DNA
ttgcagttcaatgccttcac

SEQ ID NO: 12523 - DNA, 20 bp, synthetic construct
  source 1..20: mol_type = other DNA
gttcaatgccttcaccggct

SEQ ID NO: 12524 - DNA, 20 bp, synthetic construct
  source 1..20: mol_type = other DNA
actccatatgcgaacatgca

SEQ ID NO: 12525 - DNA, 20 bp, synthetic construct
  source 1..20: mol_type = other DNA
catatgcgaacatgcaaggc

SEQ ID NO: 12526 - DNA, 20 bp, synthetic construct
  source 1..20: mol_type = other DNA
ttatgttgatgtgcactata

SEQ ID NO: 12527 - DNA, 20 bp, synthetic construct
  source 1..20: mol_type = other DNA
tgcactatacggagcccaaa

SEQ ID NO: 12528 - DNA, 20 bp, synthetic construct
  source 1..20: mol_type = other DNA
agctgctaaatatgttgtac

SEQ ID NO: 12529 - DNA, 20 bp, synthetic construct
  source 1..20: mol_type = other DNA
gccctcctatacgatgagaa

SEQ ID NO: 12530 - DNA, 20 bp, synthetic construct
  source 1..20: mol_type = other DNA
tatacgatgagaaaggagta

SEQ ID NO: 12531 - DNA, 20 bp, synthetic construct
  source 1..20: mol_type = other DNA
acgatgagaaaggagtatgg

SEQ ID NO: 12532 - DNA, 20 bp, synthetic construct
  source 1..20: mol_type = other DNA
ttagaaggagcaaatcttgc

SEQ ID NO: 12533 - DNA, 20 bp, synthetic construct
  source 1..20: mol_type = other DNA
cgatgaagagcttaatggat

SEQ ID NO: 12534 - DNA, 20 bp, synthetic construct
  source 1..20: mol_type = other DNA
ggccgcgataaggtacacgg

SEQ ID NO: 12535 - DNA, 20 bp, synthetic construct
  source 1..20: mol_type = other DNA
tgtagcggcagtatacgcag

SEQ ID NO: 12536 - DNA, 20 bp, synthetic construct
  source 1..20: mol_type = other DNA
cgcagtggcagcatacgcag

SEQ ID NO: 12537 - DNA, 20 bp, synthetic construct
  source 1..20: mol_type = other DNA
cgcagtggcagtatacgcaa

SEQ ID NO: 12538 - DNA, 20 bp, synthetic construct
  source 1..20: mol_type = other DNA
cgcaatggcagtatacgcag

SEQ ID NO: 12539 - DNA, 20 bp, synthetic construct
  source 1..20: mol_type = other DNA
cgcagcggtaagacgcgccg

SEQ ID NO: 12540 - DNA, 20 bp, synthetic construct
  source 1..20: mol_type = other DNA
agtagttcacgtaatgaccg

SEQ ID NO: 12541 - DNA, 20 bp, synthetic construct
  source 1..20: mol_type = other DNA
accgccttattaatcatcta

SEQ ID NO: 12542 - DNA, 20 bp, synthetic construct
  source 1..20: mol_type = other DNA
attaatcatctacggtccaa

SEQ ID NO: 12543 - DNA, 20 bp, synthetic construct
  source 1..20: mol_type = other DNA
ttatgagcgtaagactaagc

SEQ ID NO: 12544 - DNA, 20 bp, synthetic construct
  source 1..20: mol_type = other DNA
atgcttacgcttcgtaatgt

SEQ ID NO: 12545 - DNA, 20 bp, synthetic construct
  source 1..20: mol_type = other DNA
aactataggccagactacac

SEQ ID NO: 12546 - DNA, 20 bp, synthetic construct
  source 1..20: mol_type = other DNA
ttatgaaacatcgcaagtag

SEQ ID NO: 12547 - DNA, 20 bp, synthetic construct
  source 1..20: mol_type = other DNA
tatgaaacatcgcaagtagt

SEQ ID NO: 12548 - DNA, 20 bp, synthetic construct
  source 1..20: mol_type = other DNA
atcgcaagtagtgggaaact

SEQ ID NO: 12549 - DNA, 20 bp, synthetic construct
  source 1..20: mol_type = other DNA
ataaagatggcgattattgc

SEQ ID NO: 12550 - DNA, 20 bp, synthetic construct
  source 1..20: mol_type = other DNA
taaagatggcgattattgct

SEQ ID NO: 12551 - DNA, 20 bp, synthetic construct
  source 1..20: mol_type = other DNA
ttatgcgaccacatcccatg

SEQ ID NO: 12552 - DNA, 20 bp, synthetic construct
  source 1..20: mol_type = other DNA
gaccacatcccatgcggccg

SEQ ID NO: 12553 - DNA, 20 bp, synthetic construct
  source 1..20: mol_type = other DNA
cagtaaacccgcgctcctcg

SEQ ID NO: 12554 - DNA, 20 bp, synthetic construct
  source 1..20: mol_type = other DNA
atagtatatgtcgcgctgac

SEQ ID NO: 12555 - DNA, 20 bp, synthetic construct
  source 1..20: mol_type = other DNA
atgtcgcgctgactggccaa

SEQ ID NO: 12556 - DNA, 20 bp, synthetic construct
  source 1..20: mol_type = other DNA
tgtcgcgctgactggccaaa

SEQ ID NO: 12557 - DNA, 20 bp, synthetic construct
  source 1..20: mol_type = other DNA
ctgactggccaaagggtcgc

SEQ ID NO: 12558 - DNA, 20 bp, synthetic construct
  source 1..20: mol_type = other DNA
actggccaaagggtcgccgg

SEQ ID NO: 12559 - DNA, 20 bp, synthetic construct
  source 1..20: mol_type = other DNA
gaaggccgacaagattatat

SEQ ID NO: 12560 - DNA, 20 bp, synthetic construct
  source 1..20: mol_type = other DNA
cccaagacttgcttaatagc

SEQ ID NO: 12561 - DNA, 20 bp, synthetic construct
  source 1..20: mol_type = other DNA
caataaagtacgcccgcata

SEQ ID NO: 12562 - DNA, 20 bp, synthetic construct
  source 1..20: mol_type = other DNA
aataaagtacgcccgcatac

SEQ ID NO: 12563 - DNA, 20 bp, synthetic construct
  source 1..20: mol_type = other DNA
ttgggaaacaagcttacctt

SEQ ID NO: 12564 - DNA, 20 bp, synthetic construct
  source 1..20: mol_type = other DNA
ctggcaggatgctccgattc

SEQ ID NO: 12565 - DNA, 20 bp, synthetic construct
  source 1..20: mol_type = other DNA
tggcaggatgctccgattca

SEQ ID NO: 12566 - DNA, 20 bp, synthetic construct
  source 1..20: mol_type = other DNA
attcagggcacggcccagat

SEQ ID NO: 12567 - DNA, 20 bp, synthetic construct
  source 1..20: mol_type = other DNA
ttcctcgcaacggatatgac

SEQ ID NO: 12568 - DNA, 20 bp, synthetic construct
  source 1..20: mol_type = other DNA
tcctcgcaacggatatgact

SEQ ID NO: 12569 - DNA, 20 bp, synthetic construct
  source 1..20: mol_type = other DNA
tacacgcttgtagatccctt

SEQ ID NO: 12570 - DNA, 20 bp, synthetic construct
  source 1..20: mol_type = other DNA
aaagaatgcgtaccgaaact

SEQ ID NO: 12571 - DNA, 20 bp, synthetic construct
  source 1..20: mol_type = other DNA
aacgtaagattcgatgtaaa

SEQ ID NO: 12572 - DNA, 20 bp, synthetic construct
  source 1..20: mol_type = other DNA
ttccctggacgaatatagtt

SEQ ID NO: 12573 - DNA, 20 bp, synthetic construct
  source 1..20: mol_type = other DNA
atataagcacttggtcggcc

SEQ ID NO: 12574 - DNA, 20 bp, synthetic construct
  source 1..20: mol_type = other DNA
taagcacttggtcggccagg

SEQ ID NO: 12575 - DNA, 20 bp, synthetic construct
  source 1..20: mol_type = other DNA
cttggtcggccaggaggtat

SEQ ID NO: 12576 - DNA, 20 bp, synthetic construct
  source 1..20: mol_type = other DNA
ggtcggccaggaggtatcgg

SEQ ID NO: 12577 - DNA, 20 bp, synthetic construct
  source 1..20: mol_type = other DNA
cggccaggaggtatcggtgg

SEQ ID NO: 12578 - DNA, 20 bp, synthetic construct
  source 1..20: mol_type = other DNA
acaagatattactcctatta

SEQ ID NO: 12579 - DNA, 20 bp, synthetic construct
  source 1..20: mol_type = other DNA
tattacggacgcaacgtatc

SEQ ID NO: 12580 - DNA, 20 bp, synthetic construct
  source 1..20: mol_type = other DNA
cataaagcttgcatcgcaaa

SEQ ID NO: 12581 - DNA, 20 bp, synthetic construct
  source 1..20: mol_type = other DNA
atcctcatcaacaccgagat

SEQ ID NO: 12582 - DNA, 20 bp, synthetic construct
  source 1..20: mol_type = other DNA
agacgcatgttcatctatat

SEQ ID NO: 12583 - DNA, 20 bp, synthetic construct
  source 1..20: mol_type = other DNA
tacatacccttccactacgg

SEQ ID NO: 12584 - DNA, 20 bp, synthetic construct
  source 1..20: mol_type = other DNA
tagttgggacacggattacg

SEQ ID NO: 12585 - DNA, 20 bp, synthetic construct
  source 1..20: mol_type = other DNA
agttgggacacggattacgt

SEQ ID NO: 12586 - DNA, 20 bp, synthetic construct
  source 1..20: mol_type = other DNA
gttgggacacggattacgtg

SEQ ID NO: 12587 - DNA, 20 bp, synthetic construct
  source 1..20: mol_type = other DNA
tatcactacggctgatcttg

SEQ ID NO: 12588 - DNA, 20 bp, synthetic construct
  source 1..20: mol_type = other DNA
tacggctgatcttgtggtat

SEQ ID NO: 12589 - DNA, 20 bp, synthetic construct
  source 1..20: mol_type = other DNA
acacaatgggttcgatctgt

SEQ ID NO: 12590 - DNA, 20 bp, synthetic construct
  source 1..20: mol_type = other DNA
cgtcgattcgtggtatcatt

SEQ ID NO: 12591 - DNA, 20 bp, synthetic construct
  source 1..20: mol_type = other DNA
ttgcaacaccttggttccgc

SEQ ID NO: 12592 - DNA, 20 bp, synthetic construct
  source 1..20: mol_type = other DNA
tgcaacaccttggttccgca

SEQ ID NO: 12593 - DNA, 20 bp, synthetic construct
  source 1..20: mol_type = other DNA
tcttgaatacaaccgcagtt

SEQ ID NO: 12594 - DNA, 20 bp, synthetic construct
  source 1..20: mol_type = other DNA
acattgcagcccaaactgcg

SEQ ID NO: 12595 - DNA, 20 bp, synthetic construct
  source 1..20: mol_type = other DNA
cgtggtgttaaacaccatgt

SEQ ID NO: 12596 - DNA, 20 bp, synthetic construct
  source 1..20: mol_type = other DNA
tacctgcagcatgggattat

SEQ ID NO: 12597 - DNA, 20 bp, synthetic construct
  source 1..20: mol_type = other DNA
ctatgcgccctaataagata

SEQ ID NO: 12598 - DNA, 20 bp, synthetic construct
  source 1..20: mol_type = other DNA
ggtcttgtattgatcatacg

SEQ ID NO: 12599 - DNA, 20 bp, synthetic construct
  source 1..20: mol_type = other DNA
ttcgcagcatattccacctc

SEQ ID NO: 12600 - DNA, 20 bp, synthetic construct
  source 1..20: mol_type = other DNA
aggataattacgaagagttg

SEQ ID NO: 12601 - DNA, 20 bp, synthetic construct
  source 1..20: mol_type = other DNA
ggataattacgaagagttgc

SEQ ID NO: 12602 - DNA, 20 bp, synthetic construct
  source 1..20: mol_type = other DNA
cgaagagttgcgggccgcta

SEQ ID NO: 12603 - DNA, 20 bp, synthetic construct
  source 1..20: mol_type = other DNA
catccattcaattaggcaac

SEQ ID NO: 12604 - DNA, 20 bp, synthetic construct
  source 1..20: mol_type = other DNA
ttaggcaactggacactcct

SEQ ID NO: 12605 - DNA, 20 bp, synthetic construct
  source 1..20: mol_type = other DNA
agaaaccggcccggatgctc

SEQ ID NO: 12606 - DNA, 20 bp, synthetic construct
  source 1..20: mol_type = other DNA
gaaaccggcccggatgctcc

SEQ ID NO: 12607 - DNA, 20 bp, synthetic construct
  source 1..20: mol_type = other DNA
aaaccggcccggatgctccg

SEQ ID NO: 12608 - DNA, 20 bp, synthetic construct
  source 1..20: mol_type = other DNA
tcacacggatagcgggatta

SEQ ID NO: 12609 - DNA, 20 bp, synthetic construct
  source 1..20: mol_type = other DNA
cacacggatagcgggattaa

SEQ ID NO: 12610 - DNA, 20 bp, synthetic construct
  source 1..20: mol_type = other DNA
atgtgcctgatgatacgata

SEQ ID NO: 12611 - DNA, 20 bp, synthetic construct
  source 1..20: mol_type = other DNA
tgtgcctgatgatacgatac

SEQ ID NO: 12612 - DNA, 20 bp, synthetic construct
  source 1..20: mol_type = other DNA
atacgatacgggtagatatg

SEQ ID NO: 12613 - DNA, 20 bp, synthetic construct
  source 1..20: mol_type = other DNA
tacgatacgggtagatatgt

SEQ ID NO: 12614 - DNA, 20 bp, synthetic construct
  source 1..20: mol_type = other DNA
atggccctaacgacccattc

SEQ ID NO: 12615 - DNA, 20 bp, synthetic construct
  source 1..20: mol_type = other DNA
tggccctaacgacccattca

SEQ ID NO: 12616 - DNA, 20 bp, synthetic construct
  source 1..20: mol_type = other DNA
accctcaaatcgttcatatg

SEQ ID NO: 12617 - DNA, 20 bp, synthetic construct
  source 1..20: mol_type = other DNA
ccctcaaatcgttcatatga

SEQ ID NO: 12618 - DNA, 20 bp, synthetic construct
  source 1..20: mol_type = other DNA
tccgatcgatatacagcaaa

SEQ ID NO: 12619 - DNA, 20 bp, synthetic construct
  source 1..20: mol_type = other DNA
gtgcttaaaggctgaacaaa

SEQ ID NO: 12620 - DNA, 20 bp, synthetic construct
  source 1..20: mol_type = other DNA
gaaacttgtgtacatccgcg

SEQ ID NO: 12621 - DNA, 20 bp, synthetic construct
  source 1..20: mol_type = other DNA
gtgcgactacattagcaatt

SEQ ID NO: 12622 - DNA, 20 bp, synthetic construct
  source 1..20: mol_type = other DNA
attatcccgtgccacattcg

SEQ ID NO: 12623 - DNA, 20 bp, synthetic construct
  source 1..20: mol_type = other DNA
gcagaagacattcaaccagt

SEQ ID NO: 12624 - DNA, 20 bp, synthetic construct
  source 1..20: mol_type = other DNA
ggccttaatcattacagcgg

SEQ ID NO: 12625 - DNA, 20 bp, synthetic construct
  source 1..20: mol_type = other DNA
atccacgacaaatataaggg

SEQ ID NO: 12626 - DNA, 20 bp, synthetic construct
  source 1..20: mol_type = other DNA
gatacctgccggtccaaagc

SEQ ID NO: 12627 - DNA, 20 bp, synthetic construct
  source 1..20: mol_type = other DNA
aaagccggccggtccaaagc

SEQ ID NO: 12628 - DNA, 20 bp, synthetic construct
  source 1..20: mol_type = other DNA
cgattcaaagccggccagtt

SEQ ID NO: 12629 - DNA, 20 bp, synthetic construct
  source 1..20: mol_type = other DNA
caaagctgttagccgattat

SEQ ID NO: 12630 - DNA, 20 bp, synthetic construct
  source 1..20: mol_type = other DNA
atactaaattcccggtactg

SEQ ID NO: 12631 - DNA, 20 bp, synthetic construct
  source 1..20: mol_type = other DNA
ttacggcgatgcgcaagatc

SEQ ID NO: 12632 - DNA, 20 bp, synthetic construct
  source 1..20: mol_type = other DNA
taggcgcaatgttgttcgta

SEQ ID NO: 12633 - DNA, 20 bp, synthetic construct
  source 1..20: mol_type = other DNA
ccgcaggtggctagcttaaa

SEQ ID NO: 12634 - DNA, 20 bp, synthetic construct
  source 1..20: mol_type = other DNA
atagttcggttccgtctacg

SEQ ID NO: 12635 - DNA, 20 bp, synthetic construct
  source 1..20: mol_type = other DNA
atgccgggccagcactataa

SEQ ID NO: 12636 - DNA, 20 bp, synthetic construct
  source 1..20: mol_type = other DNA
agcgcacaatctacctgcgt

SEQ ID NO: 12637 - DNA, 20 bp, synthetic construct
  source 1..20: mol_type = other DNA
tgtcaaaccgaacatagagc

SEQ ID NO: 12638 - DNA, 20 bp, synthetic construct
  source 1..20: mol_type = other DNA
ccgcccaaagattcgcaaca

SEQ ID NO: 12639 - DNA, 20 bp, synthetic construct
  source 1..20: mol_type = other DNA
agcgtatcaaacccattata

SEQ ID NO: 12640 - DNA, 20 bp, synthetic construct
  source 1..20: mol_type = other DNA
atattgttaccttggtgccc

SEQ ID NO: 12641 - DNA, 20 bp, synthetic construct
  source 1..20: mol_type = other DNA
ctcagtaccgttaaccagtg

SEQ ID NO: 12642 - DNA, 20 bp, synthetic construct
  source 1..20: mol_type = other DNA
accgttaaccagtgcggaaa

SEQ ID NO: 12643 - DNA, 20 bp, synthetic construct
  source 1..20: mol_type = other DNA
tatccgtcccattatcctga

SEQ ID NO: 12644 - DNA, 20 bp, synthetic construct
  source 1..20: mol_type = other DNA
tgtcagttgcaacattcctt

SEQ ID NO: 12645 - DNA, 20 bp, synthetic construct
  source 1..20: mol_type = other DNA
gcgaaataaagatacagtgt

SEQ ID NO: 12646 - DNA, 20 bp, synthetic construct
  source 1..20: mol_type = other DNA
gatacagtgtgggcccgctt

SEQ ID NO: 12647 - DNA, 20 bp, synthetic construct
  source 1..20: mol_type = other DNA
caaggcgcagatgagcgctc

SEQ ID NO: 12648 - DNA, 20 bp, synthetic construct
  source 1..20: mol_type = other DNA
gctctggcgctaaccatgca

SEQ ID NO: 12649 - DNA, 20 bp, synthetic construct
  source 1..20: mol_type = other DNA
ggattaaggaacactgtcca

SEQ ID NO: 12650 - DNA, 20 bp, synthetic construct
  source 1..20: mol_type = other DNA
aagccactctctaaacagcg

SEQ ID NO: 12651 - DNA, 20 bp, synthetic construct
  source 1..20: mol_type = other DNA
agccactctctaaacagcgc

SEQ ID NO: 12652 - DNA, 20 bp, synthetic construct
  source 1..20: mol_type = other DNA
acaggaacgattgaagacat

SEQ ID NO: 12653 - DNA, 20 bp, synthetic construct
  source 1..20: mol_type = other DNA
cttgacattaaacaactcgg

SEQ ID NO: 12654 - DNA, 20 bp, synthetic construct
  source 1..20: mol_type = other DNA
tccataacaacgtaaataac

SEQ ID NO: 12655 - DNA, 20 bp, synthetic construct
  source 1..20: mol_type = other DNA
aaacaacgtctcccggagtt

SEQ ID NO: 12656 - DNA, 20 bp, synthetic construct
  source 1..20: mol_type = other DNA
tccaacctccctcgcagacc

SEQ ID NO: 12657 - DNA, 20 bp, synthetic construct
  source 1..20: mol_type = other DNA
ctcattataaagtcacgcac

SEQ ID NO: 12658 - DNA, 20 bp, synthetic construct
  source 1..20: mol_type = other DNA
ataaagtcacgcactggatc

SEQ ID NO: 12659 - DNA, 20 bp, synthetic construct
  source 1..20: mol_type = other DNA
atgatattaggccaaacagt

SEQ ID NO: 12660 - DNA, 20 bp, synthetic construct
  source 1..20: mol_type = other DNA
ctaccatacgaagcctctga

SEQ ID NO: 12661 - DNA, 20 bp, synthetic construct
  source 1..20: mol_type = other DNA
gggccttatctatgcaaccg

SEQ ID NO: 12662 - DNA, 20 bp, synthetic construct
  source 1..20: mol_type = other DNA
ggccttatctatgcaaccgc

SEQ ID NO: 12663 - DNA, 20 bp, synthetic construct
  source 1..20: mol_type = other DNA
gccttatctatgcaaccgcg

SEQ ID NO: 12664 - DNA, 20 bp, synthetic construct
  source 1..20: mol_type = other DNA
ccttatctatgcaaccgcgg

SEQ ID NO: 12665 - DNA, 20 bp, synthetic construct
  source 1..20: mol_type = other DNA
ggcgcagctacatacaatga

SEQ ID NO: 12666 - DNA, 20 bp, synthetic construct
  source 1..20: mol_type = other DNA
ggaaggacgacagtacggtg

SEQ ID NO: 12667 - DNA, 20 bp, synthetic construct
  source 1..20: mol_type = other DNA
agtacggtgtggaaacccac

SEQ ID NO: 12668 - DNA, 20 bp, synthetic construct
  source 1..20: mol_type = other DNA
cattaagaccgcctgcgaaa

SEQ ID NO: 12669 - DNA, 20 bp, synthetic construct
  source 1..20: mol_type = other DNA
aaacattcatgatcgtccca

SEQ ID NO: 12670 - DNA, 20 bp, synthetic construct
  source 1..20: mol_type = other DNA
cgatagtgaggcgattgcgc

SEQ ID NO: 12671 - DNA, 20 bp, synthetic construct
  source 1..20: mol_type = other DNA
aagcggaaattaagaatctg

SEQ ID NO: 12672 - DNA, 20 bp, synthetic construct
  source 1..20: mol_type = other DNA
agcggaaattaagaatctgt

SEQ ID NO: 12673 - DNA, 20 bp, synthetic construct
  source 1..20: mol_type = other DNA
aaatcccttaaccgctaaag

SEQ ID NO: 12674 - DNA, 20 bp, synthetic construct
  source 1..20: mol_type = other DNA
tccacggttgttgcggaaac

SEQ ID NO: 12675 - DNA, 20 bp, synthetic construct
  source 1..20: mol_type = other DNA
ctgaagtacgtcatagatcc

SEQ ID NO: 12676 - DNA, 20 bp, synthetic construct
  source 1..20: mol_type = other DNA
tgaagtacgtcatagatccc

SEQ ID NO: 12677 - DNA, 20 bp, synthetic construct
  source 1..20: mol_type = other DNA
agtacgtcatagatcccggg

SEQ ID NO: 12678 - DNA, 20 bp, synthetic construct
  source 1..20: mol_type = other DNA
ttgaaacctactaccctgaa

SEQ ID NO: 12679 - DNA, 20 bp, synthetic construct
  source 1..20: mol_type = other DNA
acctactaccctgaatgggc

SEQ ID NO: 12680 - DNA, 20 bp, synthetic construct
  source 1..20: mol_type = other DNA
tactaccctgaatgggcggg

SEQ ID NO: 12681 - DNA, 20 bp, synthetic construct
  source 1..20: mol_type = other DNA
aagccgtatcgagcaaagaa

SEQ ID NO: 12682 - DNA, 20 bp, synthetic construct
  source 1..20: mol_type = other DNA
agccgtatcgagcaaagaaa

SEQ ID NO: 12683 - DNA, 20 bp, synthetic construct
  source 1..20: mol_type = other DNA
gcagtatcctgaaatcatta

SEQ ID NO: 12684 - DNA, 20 bp, synthetic construct
  source 1..20: mol_type = other DNA
tatcctgaaatcattacgga

SEQ ID NO: 12685 - DNA, 20 bp, synthetic construct
  source 1..20: mol_type = other DNA
gaaatcattacggaaggccc

SEQ ID NO: 12686 - DNA, 20 bp, synthetic construct
  source 1..20: mol_type = other DNA
aaatcattacggaaggccct

SEQ ID NO: 12687 - DNA, 20 bp, synthetic construct
  source 1..20: mol_type = other DNA
aatcattacggaaggccctg

SEQ ID NO: 12688 - DNA, 20 bp, synthetic construct
  source 1..20: mol_type = other DNA
ggtcttcaactcacgcagct

SEQ ID NO: 12689 - DNA, 20 bp, synthetic construct
  source 1..20: mol_type = other DNA
cctagccgtcgtgtctgttg

SEQ ID NO: 12690 - DNA, 20 bp, synthetic construct
  source 1..20: mol_type = other DNA
atctattggacagtaaacaa

SEQ ID NO: 12691 - DNA, 20 bp, synthetic construct
  source 1..20: mol_type = other DNA
cggagctatgcttgctgaag

SEQ ID NO: 12692 - DNA, 20 bp, synthetic construct
  source 1..20: mol_type = other DNA
ttaaacgagctggccattgt

SEQ ID NO: 12693 - DNA, 20 bp, synthetic construct
  source 1..20: mol_type = other DNA
cttcgtgcattgtaacgcct

SEQ ID NO: 12694 - DNA, 20 bp, synthetic construct
  source 1..20: mol_type = other DNA
cctcgatggattcgtaaacg

SEQ ID NO: 12695 - DNA, 20 bp, synthetic construct
  source 1..20: mol_type = other DNA
ggagctcatagggttaccta

SEQ ID NO: 12696 - DNA, 20 bp, synthetic construct
  source 1..20: mol_type = other DNA
gctcatagggttacctatgg

SEQ ID NO: 12697 - DNA, 20 bp, synthetic construct
  source 1..20: mol_type = other DNA
atcgtgtatgaccttcataa

SEQ ID NO: 12698 - DNA, 20 bp, synthetic construct
  source 1..20: mol_type = other DNA
ccatactattcgtagagaca

SEQ ID NO: 12699 - DNA, 20 bp, synthetic construct
  source 1..20: mol_type = other DNA
taactcctgggatagctcaa

SEQ ID NO: 12700 - DNA, 20 bp, synthetic construct
  source 1..20: mol_type = other DNA
gggatagctcaagggcaata

SEQ ID NO: 12701 - DNA, 20 bp, synthetic construct
  source 1..20: mol_type = other DNA
ggcgttgtaccattccgcgt

SEQ ID NO: 12702 - DNA, 20 bp, synthetic construct
  source 1..20: mol_type = other DNA
cgcgtaggccgtcacgacct

SEQ ID NO: 12703 - DNA, 20 bp, synthetic construct
  source 1..20: mol_type = other DNA
aggccgtcacgacctcggat

SEQ ID NO: 12704 - DNA, 20 bp, synthetic construct
  source 1..20: mol_type = other DNA
atgtactcgtgaataaagcg

SEQ ID NO: 12705 - DNA, 20 bp, synthetic construct
  source 1..20: mol_type = other DNA
atagttggacgcggcgacca

SEQ ID NO: 12706 - DNA, 20 bp, synthetic construct
  source 1..20: mol_type = other DNA
gttggacgcggcgaccatgg

SEQ ID NO: 12707 - DNA, 20 bp, synthetic construct
  source 1..20: mol_type = other DNA
tctcgagcggtgacatcgcc

SEQ ID NO: 12708 - DNA, 20 bp, synthetic construct
  source 1..20: mol_type = other DNA
agccgcatgaaggcactgtt

SEQ ID NO: 12709 - DNA, 20 bp, synthetic construct
  source 1..20: mol_type = other DNA
aagaaggctgatgttgagct

SEQ ID NO: 12710 - DNA, 20 bp, synthetic construct
  source 1..20: mol_type = other DNA
aaggctgatgttgagcttgg

SEQ ID NO: 12711 - DNA, 20 bp, synthetic construct
  source 1..20: mol_type = other DNA
atagtgatcgcccaatacca

SEQ ID NO: 12712 - DNA, 20 bp, synthetic construct
  source 1..20: mol_type = other DNA
ctccttcaggccgcgaaata

SEQ ID NO: 12713 - DNA, 20 bp, synthetic construct
  source 1..20: mol_type = other DNA
cgcgaaatatggccgtgctc

SEQ ID NO: 12714 - DNA, 20 bp, synthetic construct
  source 1..20: mol_type = other DNA
cacagcctagcatcaagttc

SEQ ID NO: 12715 - DNA, 20 bp, synthetic construct
  source 1..20: mol_type = other DNA
attaatgagcttggccggga

SEQ ID NO: 12716 - DNA, 20 bp, synthetic construct
  source 1..20: mol_type = other DNA
tatagatgtgcagctcatcc

SEQ ID NO: 12717 - DNA, 20 bp, synthetic construct
  source 1..20: mol_type = other DNA
cttgtgggcccaatacataa

SEQ ID NO: 12718 - DNA, 20 bp, synthetic construct
  source 1..20: mol_type = other DNA
ccgatagttggcggatgtat

SEQ ID NO: 12719 - DNA, 20 bp, synthetic construct
  source 1..20: mol_type = other DNA
gttggcggatgtattggcca

SEQ ID NO: 12720 - DNA, 20 bp, synthetic construct
  source 1..20: mol_type = other DNA
cgaatacgacgttgctccat

SEQ ID NO: 12721 - DNA, 20 bp, synthetic construct
  source 1..20: mol_type = other DNA
gaatacgacgttgctccata

SEQ ID NO: 12722 - DNA, 20 bp, synthetic construct
  source 1..20: mol_type = other DNA
aatacgacgttgctccatag

SEQ ID NO: 12723 - DNA, 20 bp, synthetic construct
  source 1..20: mol_type = other DNA
atacgacgttgctccatagg

SEQ ID NO: 12724 - DNA, 20 bp, synthetic construct
  source 1..20: mol_type = other DNA
gggtactccacataatactc

SEQ ID NO: 12725 - DNA, 20 bp, synthetic construct
  source 1..20: mol_type = other DNA
cataatactctggaggaagc

SEQ ID NO: 12726 - DNA, 20 bp, synthetic construct
  source 1..20: mol_type = other DNA
ttatgtaaataccgagcttc

SEQ ID NO: 12727 - DNA, 20 bp, synthetic construct
  source 1..20: mol_type = other DNA
gggatcatgtagcattaata

SEQ ID NO: 12728 - DNA, 20 bp, synthetic construct
  source 1..20: mol_type = other DNA
gagagtgagtggtcgtcggt

SEQ ID NO: 12729 - DNA, 20 bp, synthetic construct
  source 1..20: mol_type = other DNA
agagtgagtggtcgtcggtc

SEQ ID NO: 12730 - DNA, 20 bp, synthetic construct
  source 1..20: mol_type = other DNA
atgtctgccgcgcaatagac

SEQ ID NO: 12731 - DNA, 20 bp, synthetic construct
  source 1..20: mol_type = other DNA
cgcaatagacaggccttaca

SEQ ID NO: 12732 - DNA, 20 bp, synthetic construct
  source 1..20: mol_type = other DNA
ggcttccttgttcattcgta

SEQ ID NO: 12733 - DNA, 20 bp, synthetic construct
  source 1..20: mol_type = other DNA
gaggagccgtagaggagcga

SEQ ID NO: 12734 - DNA, 20 bp, synthetic construct
  source 1..20: mol_type = other DNA
tacggtggcatcgtgctgta

SEQ ID NO: 12735 - DNA, 20 bp, synthetic construct
  source 1..20: mol_type = other DNA
atggcaaagccgtgatagcg

SEQ ID NO: 12736 - DNA, 20 bp, synthetic construct
  source 1..20: mol_type = other DNA
ggcaaagccgtgatagcgcg

SEQ ID NO: 12737 - DNA, 20 bp, synthetic construct
  source 1..20: mol_type = other DNA
gcaaagccgtgatagcgcgg

SEQ ID NO: 12738 - DNA, 20 bp, synthetic construct
  source 1..20: mol_type = other DNA
caaagccgtgatagcgcggg

SEQ ID NO: 12739 - DNA, 20 bp, synthetic construct
  source 1..20: mol_type = other DNA
gtccaacatgagacccgagt

SEQ ID NO: 12740 - DNA, 20 bp, synthetic construct
  source 1..20: mol_type = other DNA
ctgaaagctctcgagtcaaa

SEQ ID NO: 12741 - DNA, 20 bp, synthetic construct
  source 1..20: mol_type = other DNA
gcgctgagcggtgagctgaa

SEQ ID NO: 12742 - DNA, 20 bp, synthetic construct
  source 1..20: mol_type = other DNA
cggtgagctgaatggtatcg

SEQ ID NO: 12743 - DNA, 20 bp, synthetic construct
  source 1..20: mol_type = other DNA
tctatatcgagtggcacgcc

SEQ ID NO: 12744 - DNA, 20 bp, synthetic construct
  source 1..20: mol_type = other DNA
catacgcaatacgccctctg

SEQ ID NO: 12745 - DNA, 20 bp, synthetic construct
  source 1..20: mol_type = other DNA
tgacctcgtggaggaatatg

SEQ ID NO: 12746 - DNA, 20 bp, synthetic construct
  source 1..20: mol_type = other DNA
ggagaacttcgtcgacagtg

SEQ ID NO: 12747 - DNA, 20 bp, synthetic construct
  source 1..20: mol_type = other DNA
cgaggacaaggacgagatcg

SEQ ID NO: 12748 - DNA, 20 bp, synthetic construct
  source 1..20: mol_type = other DNA
gagtctccgtccatctgcga

SEQ ID NO: 12749 - DNA, 20 bp, synthetic construct
  source 1..20: mol_type = other DNA
gcaggcctcgtcgcaaacat

SEQ ID NO: 12750 - DNA, 20 bp, synthetic construct
  source 1..20: mol_type = other DNA
cgccgttagagcgcaacagt

SEQ ID NO: 12751 - DNA, 20 bp, synthetic construct
  source 1..20: mol_type = other DNA
gcgcaacagttggcaattaa

SEQ ID NO: 12752 - DNA, 20 bp, synthetic construct
  source 1..20: mol_type = other DNA
gctcgtcatgcgctgcatca

SEQ ID NO: 12753 - DNA, 20 bp, synthetic construct
  source 1..20: mol_type = other DNA
tgcatcaaggtaacacccga

SEQ ID NO: 12754 - DNA, 20 bp, synthetic construct
  source 1..20: mol_type = other DNA
ctcataaagagacttaaagt

SEQ ID NO: 12755 - DNA, 20 bp, synthetic construct
  source 1..20: mol_type = other DNA
atacatcgtagcaatcacaa

SEQ ID NO: 12756 - DNA, 20 bp, synthetic construct
  source 1..20: mol_type = other DNA
ctattaataaagctgtctat

SEQ ID NO: 12757 - DNA, 20 bp, synthetic construct
  source 1..20: mol_type = other DNA
tgacccgatgttgttgtacc

SEQ ID NO: 12758 - DNA, 20 bp, synthetic construct
  source 1..20: mol_type = other DNA
agagctatagtcacttgagt

SEQ ID NO: 12759 - DNA, 20 bp, synthetic construct
  source 1..20: mol_type = other DNA
tggccttgtccaaatcgcgc

SEQ ID NO: 12760 - DNA, 20 bp, synthetic construct
  source 1..20: mol_type = other DNA
gtccaaatcgcgctggtgat

SEQ ID NO: 12761 - DNA, 20 bp, synthetic construct
  source 1..20: mol_type = other DNA
gcgctggtgataggagctat

SEQ ID NO: 12762 - DNA, 20 bp, synthetic construct
  source 1..20: mol_type = other DNA
ggcaaatgccgtggagattg

SEQ ID NO: 12763 - DNA, 20 bp, synthetic construct
  source 1..20: mol_type = other DNA
cgtggagattgaggcggctt

SEQ ID NO: 12764 - DNA, 20 bp, synthetic construct
  source 1..20: mol_type = other DNA
gattatgccctgcatcttaa

SEQ ID NO: 12765 - DNA, 20 bp, synthetic construct
  source 1..20: mol_type = other DNA
ttacctgcaaggtcccggag

SEQ ID NO: 12766 - DNA, 20 bp, synthetic construct
  source 1..20: mol_type = other DNA
gcccaaagcctatcccgcgc

SEQ ID NO: 12767 - DNA, 20 bp, synthetic construct
  source 1..20: mol_type = other DNA
ggtgttagcgacgtacaacc

SEQ ID NO: 12768 - DNA, 20 bp, synthetic construct
  source 1..20: mol_type = other DNA
tgagatatgtgagccctaca

SEQ ID NO: 12769 - DNA, 20 bp, synthetic construct
  source 1..20: mol_type = other DNA
gcgcgtactaagttgttcac

SEQ ID NO: 12770 - DNA, 20 bp, synthetic construct
  source 1..20: mol_type = other DNA
tataattattatccgggcaa

SEQ ID NO: 12771 - DNA, 20 bp, synthetic construct
  source 1..20: mol_type = other DNA
cgatgtagttcgcgatgctg

SEQ ID NO: 12772 - DNA, 20 bp, synthetic construct
  source 1..20: mol_type = other DNA
tgataaacttccgcagtgta

SEQ ID NO: 12773 - DNA, 20 bp, synthetic construct
  source 1..20: mol_type = other DNA
gataaacttccgcagtgtaa

SEQ ID NO: 12774 - DNA, 20 bp, synthetic construct
  source 1..20: mol_type = other DNA
gcagtgtaagggcgtcacaa

SEQ ID NO: 12775 - DNA, 20 bp, synthetic construct
  source 1..20: mol_type = other DNA
caataagtatctagaacgac

SEQ ID NO: 12776 - DNA, 20 bp, synthetic construct
  source 1..20: mol_type = other DNA
cgacaggaccttgaactgtt

SEQ ID NO: 12777 - DNA, 20 bp, synthetic construct
  source 1..20: mol_type = other DNA
aagaacgattcctgttgcat

SEQ ID NO: 12778 - DNA, 20 bp, synthetic construct
  source 1..20: mol_type = other DNA
ccgccgatcccaacaagaaa

SEQ ID NO: 12779 - DNA, 20 bp, synthetic construct
  source 1..20: mol_type = other DNA
cgatcccaacaagaaatgga

SEQ ID NO: 12780 - DNA, 20 bp, synthetic construct
  source 1..20: mol_type = other DNA
ggacctcattcccatgtatg

SEQ ID NO: 12781 - DNA, 20 bp, synthetic construct
  source 1..20: mol_type = other DNA
cattcccatgtatgaggctc

SEQ ID NO: 12782 - DNA, 20 bp, synthetic construct
  source 1..20: mol_type = other DNA
tgttgctcatatagccacag

SEQ ID NO: 12783 - DNA, 20 bp, synthetic construct
  source 1..20: mol_type = other DNA
atcttcaaatgtacgaccct

SEQ ID NO: 12784 - DNA, 20 bp, synthetic construct
  source 1..20: mol_type = other DNA
ccaaagaaagcatactacgt

SEQ ID NO: 12785 - DNA, 20 bp, synthetic construct
  source 1..20: mol_type = other DNA
gccgctcaagcttaattgca

SEQ ID NO: 12786 - DNA, 20 bp, synthetic construct
  source 1..20: mol_type = other DNA
tcaagcttaattgcatggtt

SEQ ID NO: 12787 - DNA, 20 bp, synthetic construct
  source 1..20: mol_type = other DNA
ggttgggttgaaatggtagt

SEQ ID NO: 12788 - DNA, 20 bp, synthetic construct
  source 1..20: mol_type = other DNA
ggtagtaggtcatattgttc

SEQ ID NO: 12789 - DNA, 20 bp, synthetic construct
  source 1..20: mol_type = other DNA
acacgtaggcgccatagcat

SEQ ID NO: 12790 - DNA, 20 bp, synthetic construct
  source 1..20: mol_type = other DNA
ctggatcgcgaaataatacc

SEQ ID NO: 12791 - DNA, 20 bp, synthetic construct
  source 1..20: mol_type = other DNA
atcgcgaaataatacccggc

SEQ ID NO: 12792 - DNA, 20 bp, synthetic construct
  source 1..20: mol_type = other DNA
tcgcgaaataatacccggca

SEQ ID NO: 12793 - DNA, 20 bp, synthetic construct
  source 1..20: mol_type = other DNA
taatacccggcagggattga

SEQ ID NO: 12794 - DNA, 20 bp, synthetic construct
  source 1..20: mol_type = other DNA
aatacccggcagggattgaa

SEQ ID NO: 12795 - DNA, 20 bp, synthetic construct
  source 1..20: mol_type = other DNA
ggtgtagccaacgtactctg

SEQ ID NO: 12796 - DNA, 20 bp, synthetic construct
  source 1..20: mol_type = other DNA
gtactctgtggtaatcataa

SEQ ID NO: 12797 - DNA, 20 bp, synthetic construct
  source 1..20: mol_type = other DNA
aataaacacctcccgccata

SEQ ID NO: 12798 - DNA, 20 bp, synthetic construct
  source 1..20: mol_type = other DNA
taggacctctcgaatcgtta

SEQ ID NO: 12799 - DNA, 20 bp, synthetic construct
  source 1..20: mol_type = other DNA
aggacctctcgaatcgttag

SEQ ID NO: 12800 - DNA, 20 bp, synthetic construct
  source 1..20: mol_type = other DNA
agtaccctagtaagtcctta

SEQ ID NO: 12801 - DNA, 20 bp, synthetic construct
  source 1..20: mol_type = other DNA
gtaccctagtaagtccttat

SEQ ID NO: 12802 - DNA, 20 bp, synthetic construct
  source 1..20: mol_type = other DNA
ctagatctcgtgccgcaatg

SEQ ID NO: 12803 - DNA, 20 bp, synthetic construct
  source 1..20: mol_type = other DNA
ctcgtgccgcaatgaggttc

SEQ ID NO: 12804 - DNA, 20 bp, synthetic construct
  source 1..20: mol_type = other DNA
cgcaatgaggttcaggataa

SEQ ID NO: 12805 - DNA, 20 bp, synthetic construct
  source 1..20: mol_type = other DNA
tataagcctctatgaagggt

SEQ ID NO: 12806 - DNA, 20 bp, synthetic construct
  source 1..20: mol_type = other DNA
gccatcgtgtgattgatagg

SEQ ID NO: 12807 - DNA, 20 bp, synthetic construct
  source 1..20: mol_type = other DNA
actcaggctcctcgctatca

SEQ ID NO: 12808 - DNA, 20 bp, synthetic construct
  source 1..20: mol_type = other DNA
gtataacctgactgctgcat

SEQ ID NO: 12809 - DNA, 20 bp, synthetic construct
  source 1..20: mol_type = other DNA
acccgaatagcgcagcagtg

SEQ ID NO: 12810 - DNA, 20 bp, synthetic construct
  source 1..20: mol_type = other DNA
catactgctcaaacatccat

SEQ ID NO: 12811 - DNA, 20 bp, synthetic construct
  source 1..20: mol_type = other DNA
atggtaagcataattgcatc

SEQ ID NO: 12812 - DNA, 20 bp, synthetic construct
  source 1..20: mol_type = other DNA
aagcataattgcatctggtt

SEQ ID NO: 12813 - DNA, 20 bp, synthetic construct
  source 1..20: mol_type = other DNA
gcttgctaatattatcatat

SEQ ID NO: 12814 - DNA, 20 bp, synthetic construct
  source 1..20: mol_type = other DNA
tcgggagtatagttcgtaga

SEQ ID NO: 12815 - DNA, 20 bp, synthetic construct
  source 1..20: mol_type = other DNA
gtataataggatatgtactg

SEQ ID NO: 12816 - DNA, 20 bp, synthetic construct
  source 1..20: mol_type = other DNA
gtataataaattctagccgc

SEQ ID NO: 12817 - DNA, 20 bp, synthetic construct
  source 1..20: mol_type = other DNA
ttgattcatagcagtcttat

SEQ ID NO: 12818 - DNA, 20 bp, synthetic construct
  source 1..20: mol_type = other DNA
tagataaggtaaatcatact

SEQ ID NO: 12819 - DNA, 20 bp, synthetic construct
  source 1..20: mol_type = other DNA
ggaacttgactctgaattcc

SEQ ID NO: 12820 - DNA, 20 bp, synthetic construct
  source 1..20: mol_type = other DNA
cctatatagccgtagtattc

SEQ ID NO: 12821 - DNA, 20 bp, synthetic construct
  source 1..20: mol_type = other DNA
tccaatcgtatagcagtaat

SEQ ID NO: 12822 - DNA, 20 bp, synthetic construct
  source 1..20: mol_type = other DNA
ccaatcgtatagcagtaatc

SEQ ID NO: 12823 - DNA, 20 bp, synthetic construct
  source 1..20: mol_type = other DNA
tagcaattcgtatacaagct

SEQ ID NO: 12824 - DNA, 20 bp, synthetic construct
  source 1..20: mol_type = other DNA
ttcgtatacaagctcggcga

SEQ ID NO: 12825 - DNA, 20 bp, synthetic construct
  source 1..20: mol_type = other DNA
agttactcacatcatatccg

SEQ ID NO: 12826 - DNA, 20 bp, synthetic construct
  source 1..20: mol_type = other DNA
gttactcacatcatatccgt

SEQ ID NO: 12827 - DNA, 20 bp, synthetic construct
  source 1..20: mol_type = other DNA
catatccgtgggtacttgct

SEQ ID NO: 12828 - DNA, 20 bp, synthetic construct
  source 1..20: mol_type = other DNA
tacttgctaggcaccaggag

SEQ ID NO: 12829 - DNA, 20 bp, synthetic construct
  source 1..20: mol_type = other DNA
ttgtgagaagggtgccatcc

SEQ ID NO: 12830 - DNA, 20 bp, synthetic construct
  source 1..20: mol_type = other DNA
ttgacgggtcgcctgttgaa

SEQ ID NO: 12831 - DNA, 20 bp, synthetic construct
  source 1..20: mol_type = other DNA
tgacgggtcgcctgttgaaa

SEQ ID NO: 12832 - DNA, 20 bp, synthetic construct
  source 1..20: mol_type = other DNA
gtcgcctgttgaaagggcgc

SEQ ID NO: 12833 - DNA, 20 bp, synthetic construct
  source 1..20: mol_type = other DNA
gcctgttgaaagggcgcagg

SEQ ID NO: 12834 - DNA, 20 bp, synthetic construct
  source 1..20: mol_type = other DNA
aaagaacaacccggtgcaca

SEQ ID NO: 12835 - DNA, 20 bp, synthetic construct
  source 1..20: mol_type = other DNA
acccggtgcacatggtggga

SEQ ID NO: 12836 - DNA, 20 bp, synthetic construct
  source 1..20: mol_type = other DNA
tggtctgtaacgtcgaaagt

SEQ ID NO: 12837 - DNA, 20 bp, synthetic construct
  source 1..20: mol_type = other DNA
atcgcgcaaatagtccaccg

SEQ ID NO: 12838 - DNA, 20 bp, synthetic construct
  source 1..20: mol_type = other DNA
tatcttatcgctcaataatg

SEQ ID NO: 12839 - DNA, 20 bp, synthetic construct
  source 1..20: mol_type = other DNA
gcccgatctatccatgccca

SEQ ID NO: 12840 - DNA, 20 bp, synthetic construct
  source 1..20: mol_type = other DNA
ctccttctcgcctgaaacct

SEQ ID NO: 12841 - DNA, 20 bp, synthetic construct
  source 1..20: mol_type = other DNA
accttgggctacgtcgcctc

SEQ ID NO: 12842 - DNA, 20 bp, synthetic construct
  source 1..20: mol_type = other DNA
tgcggagcggcgggcatagc

SEQ ID NO: 12843 - DNA, 20 bp, synthetic construct
  source 1..20: mol_type = other DNA
ggcatagctggctcattaat

SEQ ID NO: 12844 - DNA, 20 bp, synthetic construct
  source 1..20: mol_type = other DNA
gctcattaatcggctagcag

SEQ ID NO: 12845 - DNA, 20 bp, synthetic construct
  source 1..20: mol_type = other DNA
taatcggctagcagaggaga

SEQ ID NO: 12846 - DNA, 20 bp, synthetic construct
  source 1..20: mol_type = other DNA
atctaatatcgttgaaaccg

SEQ ID NO: 12847 - DNA, 20 bp, synthetic construct
  source 1..20: mol_type = other DNA
tgaaaccgaggagattgaac

SEQ ID NO: 12848 - DNA, 20 bp, synthetic construct
  source 1..20: mol_type = other DNA
agagttgtctacgatgtact

SEQ ID NO: 12849 - DNA, 20 bp, synthetic construct
  source 1..20: mol_type = other DNA
tacgatgtactcggtgtccc

SEQ ID NO: 12850 - DNA, 20 bp, synthetic construct
  source 1..20: mol_type = other DNA
acatgctgaacagcgtgaaa

SEQ ID NO: 12851 - DNA, 20 bp, synthetic construct
  source 1..20: mol_type = other DNA
ggagcaaatgattctgcagc

SEQ ID NO: 12852 - DNA, 20 bp, synthetic construct
  source 1..20: mol_type = other DNA
ggtggacatgaagctcacgg

SEQ ID NO: 12853 - DNA, 20 bp, synthetic construct
  source 1..20: mol_type = other DNA
gctcacggaggtcattaccc

SEQ ID NO: 12854 - DNA, 20 bp, synthetic construct
  source 1..20: mol_type = other DNA
cgtgaaattcttacaatgga

SEQ ID NO: 12855 - DNA, 20 bp, synthetic construct
  source 1..20: mol_type = other DNA
cgcatgtgctcatctcaagc

SEQ ID NO: 12856 - DNA, 20 bp, synthetic construct
  source 1..20: mol_type = other DNA
gcgttcgggtcttcaatacg

SEQ ID NO: 12857 - DNA, 20 bp, synthetic construct
  source 1..20: mol_type = other DNA
aagtattcgtgtactctaca

SEQ ID NO: 12858 - DNA, 20 bp, synthetic construct
  source 1..20: mol_type = other DNA
catgcttatacagcttcaag

SEQ ID NO: 12859 - DNA, 20 bp, synthetic construct
  source 1..20: mol_type = other DNA
agaggatcgtacggcagatg

SEQ ID NO: 12860 - DNA, 20 bp, synthetic construct
  source 1..20: mol_type = other DNA
gaggatcgtacggcagatgt

SEQ ID NO: 12861 - DNA, 20 bp, synthetic construct
  source 1..20: mol_type = other DNA
acggcagatgtgggcgtcat

SEQ ID NO: 12862 - DNA, 20 bp, synthetic construct
  source 1..20: mol_type = other DNA
gctacaagggcttagcgtgc

SEQ ID NO: 12863 - DNA, 20 bp, synthetic construct
  source 1..20: mol_type = other DNA
tagcgtgcaggacgacacca

SEQ ID NO: 12864 - DNA, 20 bp, synthetic construct
  source 1..20: mol_type = other DNA
gtatgattatgctgccactg

SEQ ID NO: 12865 - DNA, 20 bp, synthetic construct
  source 1..20: mol_type = other DNA
gccactgtggcccgtattga

SEQ ID NO: 12866 - DNA, 20 bp, synthetic construct
  source 1..20: mol_type = other DNA
gcatccctatgcataagcca

SEQ ID NO: 12867 - DNA, 20 bp, synthetic construct
  source 1..20: mol_type = other DNA
aaccgtgataggacgtaccc

SEQ ID NO: 12868 - DNA, 20 bp, synthetic construct
  source 1..20: mol_type = other DNA
gaagagccgaccaacggact

SEQ ID NO: 12869 - DNA, 20 bp, synthetic construct
  source 1..20: mol_type = other DNA
tcaaccctatatgatgaaag

SEQ ID NO: 12870 - DNA, 20 bp, synthetic construct
  source 1..20: mol_type = other DNA
ccacgtgctacaacatgagg

SEQ ID NO: 12871 - DNA, 20 bp, synthetic construct
  source 1..20: mol_type = other DNA
cacgtgctacaacatgaggt

SEQ ID NO: 12872 - DNA, 20 bp, synthetic construct
  source 1..20: mol_type = other DNA
gagccatggaccttcgatta

SEQ ID NO: 12873 - DNA, 20 bp, synthetic construct
  source 1..20: mol_type = other DNA
tatcagtcctgctgtgatag

SEQ ID NO: 12874 - DNA, 20 bp, synthetic construct
  source 1..20: mol_type = other DNA
ggcgctcctacgcagacatc

SEQ ID NO: 12875 - DNA, 20 bp, synthetic construct
  source 1..20: mol_type = other DNA
gcgctcctacgcagacatca

SEQ ID NO: 12876 - DNA, 20 bp, synthetic construct
  source 1..20: mol_type = other DNA
ggatgatccaaggctcatgg

SEQ ID NO: 12877 - DNA, 20 bp, synthetic construct
  source 1..20: mol_type = other DNA
agcctcctatgcatgttgaa

SEQ ID NO: 12878 - DNA, 20 bp, synthetic construct
  source 1..20: mol_type = other DNA
gcatctgtcgtatgaggaaa

SEQ ID NO: 12879 - DNA, 20 bp, synthetic construct
  source 1..20: mol_type = other DNA
ttggcgaagacattattgac

SEQ ID NO: 12880 - DNA, 20 bp, synthetic construct
  source 1..20: mol_type = other DNA
tcatctgatacttcgtgcaa

SEQ ID NO: 12881 - DNA, 20 bp, synthetic construct
  source 1..20: mol_type = other DNA
ttggctatcatcggttacat

SEQ ID NO: 12882 - DNA, 20 bp, synthetic construct
  source 1..20: mol_type = other DNA
tcattcccaacttaatcgta

SEQ ID NO: 12883 - DNA, 20 bp, synthetic construct
  source 1..20: mol_type = other DNA
tccactaaccaaatgagcta

SEQ ID NO: 12884 - DNA, 20 bp, synthetic construct
  source 1..20: mol_type = other DNA
gatgcatagctcttcatccg

SEQ ID NO: 12885 - DNA, 20 bp, synthetic construct
  source 1..20: mol_type = other DNA
tgcatagctcttcatccgtg

SEQ ID NO: 12886 - DNA, 20 bp, synthetic construct
  source 1..20: mol_type = other DNA
tgtagataatggcgggatat

SEQ ID NO: 12887 - DNA, 20 bp, synthetic construct
  source 1..20: mol_type = other DNA
ggcgggatattgggtagtaa

SEQ ID NO: 12888 - DNA, 20 bp, synthetic construct
  source 1..20: mol_type = other DNA
gcgggatattgggtagtaac

SEQ ID NO: 12889 - DNA, 20 bp, synthetic construct
  source 1..20: mol_type = other DNA
ttgggtagtaacgggatact

SEQ ID NO: 12890 - DNA, 20 bp, synthetic construct
  source 1..20: mol_type = other DNA
agtaacgggatactaggtag

SEQ ID NO: 12891 - DNA, 20 bp, synthetic construct
  source 1..20: mol_type = other DNA
cgggatactaggtagtggtt

SEQ ID NO: 12892 - DNA, 20 bp, synthetic construct
  source 1..20: mol_type = other DNA
taggattcaggtgaaggaca

SEQ ID NO: 12893 - DNA, 20 bp, synthetic construct
  source 1..20: mol_type = other DNA
ttgggtggcgggcatggctt

SEQ ID NO: 12894 - DNA, 20 bp, synthetic construct
  source 1..20: mol_type = other DNA
gggttgagtggttgtgttga

SEQ ID NO: 12895 - DNA, 20 bp, synthetic construct
  source 1..20: mol_type = other DNA
gagggacgcatgtagtaaat

SEQ ID NO: 12896 - DNA, 20 bp, synthetic construct
  source 1..20: mol_type = other DNA
tgataacgactgtaaggctt

SEQ ID NO: 12897 - DNA, 20 bp, synthetic construct
  source 1..20: mol_type = other DNA
agtaatggttctctgggaga

SEQ ID NO: 12898 - DNA, 20 bp, synthetic construct
  source 1..20: mol_type = other DNA
ttatatccaacccaatcatt

SEQ ID NO: 12899 - DNA, 20 bp, synthetic construct
  source 1..20: mol_type = other DNA
ttaggcaacagatccctgag

SEQ ID NO: 12900 - DNA, 20 bp, synthetic construct
  source 1..20: mol_type = other DNA
ggtaaagacttaggtctacg

SEQ ID NO: 12901 - DNA, 20 bp, synthetic construct
  source 1..20: mol_type = other DNA
gtaaagacttaggtctacga

SEQ ID NO: 12902 - DNA, 20 bp, synthetic construct
  source 1..20: mol_type = other DNA
taaagacttaggtctacgag

SEQ ID NO: 12903 - DNA, 20 bp, synthetic construct
  source 1..20: mol_type = other DNA
gttcttccttgggagtaaat

SEQ ID NO: 12904 - DNA, 20 bp, synthetic construct
  source 1..20: mol_type = other DNA
ttcagagttcgtgggccgag

SEQ ID NO: 12905 - DNA, 20 bp, synthetic construct
  source 1..20: mol_type = other DNA
agagttcgtgggccgagagg

SEQ ID NO: 12906 - DNA, 20 bp, synthetic construct
  source 1..20: mol_type = other DNA
gggccgagaggaggtaggtt

SEQ ID NO: 12907 - DNA, 20 bp, synthetic construct
  source 1..20: mol_type = other DNA
ctccgtcagcggtatataga

SEQ ID NO: 12908 - DNA, 20 bp, synthetic construct
  source 1..20: mol_type = other DNA
gtcagcggtatatagatgga

SEQ ID NO: 12909 - DNA, 20 bp, synthetic construct
  source 1..20: mol_type = other DNA
gattgcatcagccagttatc

SEQ ID NO: 12910 - DNA, 20 bp, synthetic construct
  source 1..20: mol_type = other DNA
tgcactgataaagaccatag

SEQ ID NO: 12911 - DNA, 20 bp, synthetic construct
  source 1..20: mol_type = other DNA
aagaccatagtggtcttcca

SEQ ID NO: 12912 - DNA, 20 bp, synthetic construct
  source 1..20: mol_type = other DNA
ggaggtgtaatgggtgtgcc

SEQ ID NO: 12913 - DNA, 20 bp, synthetic construct
  source 1..20: mol_type = other DNA
tggagtgttgcagcgccaac

SEQ ID NO: 12914 - DNA, 20 bp, synthetic construct
  source 1..20: mol_type = other DNA
ggagtgttgcagcgccaaca

SEQ ID NO: 12915 - DNA, 20 bp, synthetic construct
  source 1..20: mol_type = other DNA
gagtgttgcagcgccaacag

SEQ ID NO: 12916 - DNA, 20 bp, synthetic construct
  source 1..20: mol_type = other DNA
ttgcggccgcaaataaccta

SEQ ID NO: 12917 - DNA, 20 bp, synthetic construct
  source 1..20: mol_type = other DNA
cattgaaaccgtggataatg

SEQ ID NO: 12918 - DNA, 20 bp, synthetic construct
  source 1..20: mol_type = other DNA
tccgctgcagtaaactctac

SEQ ID NO: 12919 - DNA, 20 bp, synthetic construct
  source 1..20: mol_type = other DNA
gtaaactctacaggattgat

SEQ ID NO: 12920 - DNA, 20 bp, synthetic construct
  source 1..20: mol_type = other DNA
ttcgacgatcttatggacaa

SEQ ID NO: 12921 - DNA, 20 bp, synthetic construct
  source 1..20: mol_type = other DNA
tactgaaatagataagcttc

SEQ ID NO: 12922 - DNA, 20 bp, synthetic construct
  source 1..20: mol_type = other DNA
gcaacatcgaaactattcac

SEQ ID NO: 12923 - DNA, 20 bp, synthetic construct
  source 1..20: mol_type = other DNA
ccctgttaatctagccgccg

SEQ ID NO: 12924 - DNA, 20 bp, synthetic construct
  source 1..20: mol_type = other DNA
ttaacggcgcactacagcaa

SEQ ID NO: 12925 - DNA, 20 bp, synthetic construct
  source 1..20: mol_type = other DNA
cggcgcactacagcaatggt

SEQ ID NO: 12926 - DNA, 20 bp, synthetic construct
  source 1..20: mol_type = other DNA
gcactacagcaatggtcggc

SEQ ID NO: 12927 - DNA, 20 bp, synthetic construct
  source 1..20: mol_type = other DNA
ctacagcaatggtcggcagg

SEQ ID NO: 12928 - DNA, 20 bp, synthetic construct
  source 1..20: mol_type = other DNA
gaagaccctaatgaacccgg

SEQ ID NO: 12929 - DNA, 20 bp, synthetic construct
  source 1..20: mol_type = other DNA
cattaccataccatgcaaca

SEQ ID NO: 12930 - DNA, 20 bp, synthetic construct
  source 1..20: mol_type = other DNA
attatacgctacatgactac

SEQ ID NO: 12931 - DNA, 20 bp, synthetic construct
  source 1..20: mol_type = other DNA
gtgatagctaccgcaccaag

SEQ ID NO: 12932 - DNA, 20 bp, synthetic construct
  source 1..20: mol_type = other DNA
tgatagctaccgcaccaagc

SEQ ID NO: 12933 - DNA, 20 bp, synthetic construct
  source 1..20: mol_type = other DNA
accaagcgggtgcacggctc

SEQ ID NO: 12934 - DNA, 20 bp, synthetic construct
  source 1..20: mol_type = other DNA
ccaagcgggtgcacggctca

SEQ ID NO: 12935 - DNA, 20 bp, synthetic construct
  source 1..20: mol_type = other DNA
caagcgggtgcacggctcag

SEQ ID NO: 12936 - DNA, 20 bp, synthetic construct
  source 1..20: mol_type = other DNA
gtgatagcacccatcatcaa

SEQ ID NO: 12937 - DNA, 20 bp, synthetic construct
  source 1..20: mol_type = other DNA
tgatagcacccatcatcaat

SEQ ID NO: 12938 - DNA, 20 bp, synthetic construct
  source 1..20: mol_type = other DNA
aacccagcgaaacattatcg

SEQ ID NO: 12939 - DNA, 20 bp, synthetic construct
  source 1..20: mol_type = other DNA
ctccgatctcaatcgcagta

SEQ ID NO: 12940 - DNA, 20 bp, synthetic construct
  source 1..20: mol_type = other DNA
cgcgtgcacgcatcttatcc

SEQ ID NO: 12941 - DNA, 20 bp, synthetic construct
  source 1..20: mol_type = other DNA
accgccaatgtctgtaccgc

SEQ ID NO: 12942 - DNA, 20 bp, synthetic construct
  source 1..20: mol_type = other DNA
acaacgccttctatcagatc

SEQ ID NO: 12943 - DNA, 20 bp, synthetic construct
  source 1..20: mol_type = other DNA
caacaaggacattgtacgaa

SEQ ID NO: 12944 - DNA, 20 bp, synthetic construct
  source 1..20: mol_type = other DNA
tggtagacgaagtagaattc

SEQ ID NO: 12945 - DNA, 20 bp, synthetic construct
  source 1..20: mol_type = other DNA
agacgaagtagaattctggt

SEQ ID NO: 12946 - DNA, 20 bp, synthetic construct
  source 1..20: mol_type = other DNA
gtagaattctggttggacgt

SEQ ID NO: 12947 - DNA, 20 bp, synthetic construct
  source 1..20: mol_type = other DNA
aattctggttggacgtcggt

SEQ ID NO: 12948 - DNA, 20 bp, synthetic construct
  source 1..20: mol_type = other DNA
caaatcagggtaggcagacg

SEQ ID NO: 12949 - DNA, 20 bp, synthetic construct
  source 1..20: mol_type = other DNA
aatcagggtaggcagacggg

SEQ ID NO: 12950 - DNA, 20 bp, synthetic construct
  source 1..20: mol_type = other DNA
ataactatgtcatacccaac

SEQ ID NO: 12951 - DNA, 20 bp, synthetic construct
  source 1..20: mol_type = other DNA
caacgggcttaataccattg

SEQ ID NO: 12952 - DNA, 20 bp, synthetic construct
  source 1..20: mol_type = other DNA
attgtggcctatatgatcta

SEQ ID NO: 12953 - DNA, 20 bp, synthetic construct
  source 1..20: mol_type = other DNA
gtggcctatatgatctacgg

SEQ ID NO: 12954 - DNA, 20 bp, synthetic construct
  source 1..20: mol_type = other DNA
ctacggcggctacaatcagg

SEQ ID NO: 12955 - DNA, 20 bp, synthetic construct
  source 1..20: mol_type = other DNA
gaaagcgatatagagtcgtt

SEQ ID NO: 12956 - DNA, 20 bp, synthetic construct
  source 1..20: mol_type = other DNA
aactcaacaaatacatcgac

SEQ ID NO: 12957 - DNA, 20 bp, synthetic construct
  source 1..20: mol_type = other DNA
atcgaccggtctgtcatgta

SEQ ID NO: 12958 - DNA, 20 bp, synthetic construct
  source 1..20: mol_type = other DNA
catgtacggcttcgatgagc

SEQ ID NO: 12959 - DNA, 20 bp, synthetic construct
  source 1..20: mol_type = other DNA
cttcgatgagccggccgtcg

SEQ ID NO: 12960 - DNA, 20 bp, synthetic construct
  source 1..20: mol_type = other DNA
gacaagatgagttctcgcag

SEQ ID NO: 12961 - DNA, 20 bp, synthetic construct
  source 1..20: mol_type = other DNA
acaagatgagttctcgcagc

SEQ ID NO: 12962 - DNA, 20 bp, synthetic construct
  source 1..20: mol_type = other DNA
gagttctcgcagcgggaaca

SEQ ID NO: 12963 - DNA, 20 bp, synthetic construct
  source 1..20: mol_type = other DNA
gaacaagggcattgcggcgc

SEQ ID NO: 12964 - DNA, 20 bp, synthetic construct
  source 1..20: mol_type = other DNA
tggtctagcaaatgccctac

SEQ ID NO: 12965 - DNA, 20 bp, synthetic construct
  source 1..20: mol_type = other DNA
ggtctagcaaatgccctaca

SEQ ID NO: 12966 - DNA, 20 bp, synthetic construct
  source 1..20: mol_type = other DNA
caagaaggtctacgcttcaa

SEQ ID NO: 12967 - DNA, 20 bp, synthetic construct
  source 1..20: mol_type = other DNA
cgatacgccgttgcaagcta

SEQ ID NO: 12968 - DNA, 20 bp, synthetic construct
  source 1..20: mol_type = other DNA
gatacgccgttgcaagctat

SEQ ID NO: 12969 - DNA, 20 bp, synthetic construct
  source 1..20: mol_type = other DNA
cgttgcaagctatgggccca

SEQ ID NO: 12970 - DNA, 20 bp, synthetic construct
  source 1..20: mol_type = other DNA
tgccctcacaggccagccgt

SEQ ID NO: 12971 - DNA, 20 bp, synthetic construct
  source 1..20: mol_type = other DNA
ctcacaggccagccgttgga

SEQ ID NO: 12972 - DNA, 20 bp, synthetic construct
  source 1..20: mol_type = other DNA
gacggcaaacgatcgcacgg

SEQ ID NO: 12973 - DNA, 20 bp, synthetic construct
  source 1..20: mol_type = other DNA
atcgcacggaggtcttcgtc

SEQ ID NO: 12974 - DNA, 20 bp, synthetic construct
  source 1..20: mol_type = other DNA
tcgcacggaggtcttcgtct

SEQ ID NO: 12975 - DNA, 20 bp, synthetic construct
  source 1..20: mol_type = other DNA
aatggagcattgggtgctta

SEQ ID NO: 12976 - DNA, 20 bp, synthetic construct
  source 1..20: mol_type = other DNA
gcattgggtgcttacggcgc

SEQ ID NO: 12977 - DNA, 20 bp, synthetic construct
  source 1..20: mol_type = other DNA
cattgggtgcttacggcgca

SEQ ID NO: 12978 - DNA, 20 bp, synthetic construct
  source 1..20: mol_type = other DNA
aaatcgcacgacgactcgga

SEQ ID NO: 12979 - DNA, 20 bp, synthetic construct
  source 1..20: mol_type = other DNA
gtgcatgaactgtgatgtcc

SEQ ID NO: 12980 - DNA, 20 bp, synthetic construct
  source 1..20: mol_type = other DNA
tgtgatgtccaggccgatat

SEQ ID NO: 12981 - DNA, 20 bp, synthetic construct
  source 1..20: mol_type = other DNA
tgtccaggccgatatcggca

SEQ ID NO: 12982 - DNA, 20 bp, synthetic construct
  source 1..20: mol_type = other DNA
atagtcaaacgccgtaattc

SEQ ID NO: 12983 - DNA, 20 bp, synthetic construct
  source 1..20: mol_type = other DNA
ctccaacaacgattcgctga

SEQ ID NO: 12984 - DNA, 20 bp, synthetic construct
  source 1..20: mol_type = other DNA
tccaacaacgattcgctgac

SEQ ID NO: 12985 - DNA, 20 bp, synthetic construct
  source 1..20: mol_type = other DNA
ggccattcctcgacaaagtt

SEQ ID NO: 12986 - DNA, 20 bp, synthetic construct
  source 1..20: mol_type = other DNA
gccattcctcgacaaagttg

SEQ ID NO: 12987 - DNA, 20 bp, synthetic construct
  source 1..20: mol_type = other DNA
gagtgcgctggtgcaataga

SEQ ID NO: 12988 - DNA, 20 bp, synthetic construct
  source 1..20: mol_type = other DNA
agtgcgctggtgcaatagaa

SEQ ID NO: 12989 - DNA, 20 bp, synthetic construct
  source 1..20: mol_type = other DNA
taactgccggaatggcatat

SEQ ID NO: 12990 - DNA, 20 bp, synthetic construct
  source 1..20: mol_type = other DNA
ttaatcacataccaatggtt

SEQ ID NO: 12991 - DNA, 20 bp, synthetic construct
  source 1..20: mol_type = other DNA
ataccaatggttgggaatct

SEQ ID NO: 12992 - DNA, 20 bp, synthetic construct
  source 1..20: mol_type = other DNA
gtgtaacgagtgaggtattc

SEQ ID NO: 12993 - DNA, 20 bp, synthetic construct
  source 1..20: mol_type = other DNA
gctgtgctccgccacattgt

SEQ ID NO: 12994 - DNA, 20 bp, synthetic construct
  source 1..20: mol_type = other DNA
ttgcacgtagagggccgctg

SEQ ID NO: 12995 - DNA, 20 bp, synthetic construct
  source 1..20: mol_type = other DNA
gctgcggtaaagctgcgttg

SEQ ID NO: 12996 - DNA, 20 bp, synthetic construct
  source 1..20: mol_type = other DNA
acagttcacttcctcccgca

SEQ ID NO: 12997 - DNA, 20 bp, synthetic construct
  source 1..20: mol_type = other DNA
cttcatctacgacaactgca

SEQ ID NO: 12998 - DNA, 20 bp, synthetic construct
  source 1..20: mol_type = other DNA
cttgggtcgtagctgtatac

SEQ ID NO: 12999 - DNA, 20 bp, synthetic construct
  source 1..20: mol_type = other DNA
tagtaagacgcgatccattc

SEQ ID NO: 13000 - DNA, 20 bp, synthetic construct
  source 1..20: mol_type = other DNA
cgcgatccattctggtaaat

SEQ ID NO: 13001 - DNA, 20 bp, synthetic construct
  source 1..20: mol_type = other DNA
atagagcatcccggaatgca

SEQ ID NO: 13002 - DNA, 20 bp, synthetic construct
  source 1..20: mol_type = other DNA
tcttctgttcgtcagagaat

SEQ ID NO: 13003 - DNA, 20 bp, synthetic construct
  source 1..20: mol_type = other DNA
tatccgtcatgacggtcata

SEQ ID NO: 13004 - DNA, 20 bp, synthetic construct
  source 1..20: mol_type = other DNA
cgtcatgacggtcataaggt

SEQ ID NO: 13005 - DNA, 20 bp, synthetic construct
  source 1..20: mol_type = other DNA
ctcccaaggagaagccgtag

SEQ ID NO: 13006 - DNA, 20 bp, synthetic construct
  source 1..20: mol_type = other DNA
catgataattaacgttatca

SEQ ID NO: 13007 - DNA, 20 bp, synthetic construct
  source 1..20: mol_type = other DNA
agtccctacgcttgttgtaa

SEQ ID NO: 13008 - DNA, 20 bp, synthetic construct
  source 1..20: mol_type = other DNA
ctacgaaagagtcatcgttc

SEQ ID NO: 13009 - DNA, 20 bp, synthetic construct
  source 1..20: mol_type = other DNA
cgaaagagtcatcgttcagg

SEQ ID NO: 13010 - DNA, 20 bp, synthetic construct
  source 1..20: mol_type = other DNA
atatgcttggacgcaaacct

SEQ ID NO: 13011 - DNA, 20 bp, synthetic construct
  source 1..20: mol_type = other DNA
ataatgtatcgtattattgg

SEQ ID NO: 13012 - DNA, 20 bp, synthetic construct
  source 1..20: mol_type = other DNA
ttcacgtatagtaaggaaac

SEQ ID NO: 13013 - DNA, 20 bp, synthetic construct
  source 1..20: mol_type = other DNA
tagtaaggaaacaggtaggc

SEQ ID NO: 13014 - DNA, 20 bp, synthetic construct
  source 1..20: mol_type = other DNA
atctatggctcgaaacaatg

SEQ ID NO: 13015 - DNA, 20 bp, synthetic construct
  source 1..20: mol_type = other DNA
ggtcgccgacaccggcgcta

SEQ ID NO: 13016 - DNA, 20 bp, synthetic construct
  source 1..20: mol_type = other DNA
ggactatgtaaacattgcct

SEQ ID NO: 13017 - DNA, 20 bp, synthetic construct
  source 1..20: mol_type = other DNA
ggccgtgtccaaataagccg

SEQ ID NO: 13018 - DNA, 20 bp, synthetic construct
  source 1..20: mol_type = other DNA
gctcactatgttacaaactc

SEQ ID NO: 13019 - DNA, 20 bp, synthetic construct
  source 1..20: mol_type = other DNA
ggaattaaacttccatcaat

SEQ ID NO: 13020 - DNA, 20 bp, synthetic construct
  source 1..20: mol_type = other DNA
attatgctgttaactaagtg

SEQ ID NO: 13021 - DNA, 20 bp, synthetic construct
  source 1..20: mol_type = other DNA
aaagtgctgggtctacgcta

SEQ ID NO: 13022 - DNA, 20 bp, synthetic construct
  source 1..20: mol_type = other DNA
ggcttcattggcctcatcga

SEQ ID NO: 13023 - DNA, 20 bp, synthetic construct
  source 1..20: mol_type = other DNA
caatacgtgtcgtgcttgtt

SEQ ID NO: 13024 - DNA, 20 bp, synthetic construct
  source 1..20: mol_type = other DNA
ggcagtggtctacaaacatg

SEQ ID NO: 13025 - DNA, 20 bp, synthetic construct
  source 1..20: mol_type = other DNA
aaacgacataatggaggccg

SEQ ID NO: 13026 - DNA, 20 bp, synthetic construct
  source 1..20: mol_type = other DNA
atgacagtaataggaaccgg

SEQ ID NO: 13027 - DNA, 20 bp, synthetic construct
  source 1..20: mol_type = other DNA
ggacgagcaccgtaagtacc

SEQ ID NO: 13028 - DNA, 20 bp, synthetic construct
  source 1..20: mol_type = other DNA
taccgatcacggatctcggc

SEQ ID NO: 13029 - DNA, 20 bp, synthetic construct
  source 1..20: mol_type = other DNA
cgttctacgtgtatatagat

SEQ ID NO: 13030 - DNA, 20 bp, synthetic construct
  source 1..20: mol_type = other DNA
tgtatatagattggaggtaa

SEQ ID NO: 13031 - DNA, 20 bp, synthetic construct
  source 1..20: mol_type = other DNA
ggaggttgcggtgggcataa

SEQ ID NO: 13032 - DNA, 20 bp, synthetic construct
  source 1..20: mol_type = other DNA
ctgtgccacgcgttcttccc

SEQ ID NO: 13033 - DNA, 20 bp, synthetic construct
  source 1..20: mol_type = other DNA
tgccacgcgttcttcccagg

SEQ ID NO: 13034 - DNA, 20 bp, synthetic construct
  source 1..20: mol_type = other DNA
aatcaccgcagcgaacccat

SEQ ID NO: 13035 - DNA, 20 bp, synthetic construct
  source 1..20: mol_type = other DNA
accgcagcgaacccataggt

SEQ ID NO: 13036 - DNA, 20 bp, synthetic construct
  source 1..20: mol_type = other DNA
ccgcagcgaacccataggtc

SEQ ID NO: 13037 - DNA, 20 bp, synthetic construct
  source 1..20: mol_type = other DNA
aagttctatggatcgtcgca

SEQ ID NO: 13038 - DNA, 20 bp, synthetic construct
  source 1..20: mol_type = other DNA
gtagtatagggccgcatgga

SEQ ID NO: 13039 - DNA, 20 bp, synthetic construct
  source 1..20: mol_type = other DNA
cgcatggatggcctcatcca

SEQ ID NO: 13040 - DNA, 20 bp, synthetic construct
  source 1..20: mol_type = other DNA
aagacgcaaacacgtcggct

SEQ ID NO: 13041 - DNA, 20 bp, synthetic construct
  source 1..20: mol_type = other DNA
acgcatattgcttctccgcg

SEQ ID NO: 13042 - DNA, 20 bp, synthetic construct
  source 1..20: mol_type = other DNA
ctgatgcttctatgagccca

SEQ ID NO: 13043 - DNA, 20 bp, synthetic construct
  source 1..20: mol_type = other DNA
ttccttggccgtcgtaacac

SEQ ID NO: 13044 - DNA, 20 bp, synthetic construct
  source 1..20: mol_type = other DNA
cgtcgcctctgttatgtatt

SEQ ID NO: 13045 - DNA, 20 bp, synthetic construct
  source 1..20: mol_type = other DNA
ccatagaccgtacttgagat

SEQ ID NO: 13046 - DNA, 20 bp, synthetic construct
  source 1..20: mol_type = other DNA
catagaccgtacttgagatt

SEQ ID NO: 13047 - DNA, 20 bp, synthetic construct
  source 1..20: mol_type = other DNA
atagaccgtacttgagattg

SEQ ID NO: 13048 - DNA, 20 bp, synthetic construct
  source 1..20: mol_type = other DNA
tagaccgtacttgagattgg

SEQ ID NO: 13049 - DNA, 20 bp, synthetic construct
  source 1..20: mol_type = other DNA
ctggttcgcgtagcattgtg

SEQ ID NO: 13050 - DNA, 20 bp, synthetic construct
  source 1..20: mol_type = other DNA
gccgccgcctgaaatgatgc

SEQ ID NO: 13051 - DNA, 20 bp, synthetic construct
  source 1..20: mol_type = other DNA
gtgcctgcattgaacatggt

SEQ ID NO: 13052 - DNA, 20 bp, synthetic construct
  source 1..20: mol_type = other DNA
tgatgacgtgccgggaaagc

SEQ ID NO: 13053 - DNA, 20 bp, synthetic construct
  source 1..20: mol_type = other DNA
tcccattccatagatcataa

SEQ ID NO: 13054 - DNA, 20 bp, synthetic construct
  source 1..20: mol_type = other DNA
cataatggcgacgcgcatat

SEQ ID NO: 13055 - DNA, 20 bp, synthetic construct
  source 1..20: mol_type = other DNA
cgcgcatataggcgtcctgc

SEQ ID NO: 13056 - DNA, 20 bp, synthetic construct
  source 1..20: mol_type = other DNA
tgtaaacgacgtccacaaac

SEQ ID NO: 13057 - DNA, 20 bp, synthetic construct
  source 1..20: mol_type = other DNA
gtaaacgacgtccacaaact

SEQ ID NO: 13058 - DNA, 20 bp, synthetic construct
  source 1..20: mol_type = other DNA
taaacgacgtccacaaactg

SEQ ID NO: 13059 - DNA, 20 bp, synthetic construct
  source 1..20: mol_type = other DNA
aaacgacgtccacaaactgg

SEQ ID NO: 13060 - DNA, 20 bp, synthetic construct
  source 1..20: mol_type = other DNA
acaccgaaagtcgcgccgca

SEQ ID NO: 13061 - DNA, 20 bp, synthetic construct
  source 1..20: mol_type = other DNA
caccgaaagtcgcgccgcaa

SEQ ID NO: 13062 - DNA, 20 bp, synthetic construct
  source 1..20: mol_type = other DNA
gtgtaaggacattgatgatt

SEQ ID NO: 13063 - DNA, 20 bp, synthetic construct
  source 1..20: mol_type = other DNA
aacgctgatcccggatgaga

SEQ ID NO: 13064 - DNA, 20 bp, synthetic construct
  source 1..20: mol_type = other DNA
gaacactctgggtgagcggc

SEQ ID NO: 13065 - DNA, 20 bp, synthetic construct
  source 1..20: mol_type = other DNA
gtgggcttcgccgccgtaga

SEQ ID NO: 13066 - DNA, 20 bp, synthetic construct
  source 1..20: mol_type = other DNA
ttacgtgtataacattcccg

SEQ ID NO: 13067 - DNA, 20 bp, synthetic construct
  source 1..20: mol_type = other DNA
gcagtatcagaactgtgtta

SEQ ID NO: 13068 - DNA, 20 bp, synthetic construct
  source 1..20: mol_type = other DNA
attggaccgagttcgaatcc

SEQ ID NO: 13069 - DNA, 20 bp, synthetic construct
  source 1..20: mol_type = other DNA
gaacactctgttgcttaatt

SEQ ID NO: 13070 - DNA, 20 bp, synthetic construct
  source 1..20: mol_type = other DNA
gcttaattgggacaatgttc

SEQ ID NO: 13071 - DNA, 20 bp, synthetic construct
  source 1..20: mol_type = other DNA
ggccgcattaatatgataaa

SEQ ID NO: 13072 - DNA, 20 bp, synthetic construct
  source 1..20: mol_type = other DNA
aacgctgcgttatctactta

SEQ ID NO: 13073 - DNA, 20 bp, synthetic construct
  source 1..20: mol_type = other DNA
acgctgcgttatctacttat

SEQ ID NO: 13074 - DNA, 20 bp, synthetic construct
  source 1..20: mol_type = other DNA
gggccaatgagaatccgcgc

SEQ ID NO: 13075 - DNA, 20 bp, synthetic construct
  source 1..20: mol_type = other DNA
cctcgaaactattgagacaa

SEQ ID NO: 13076 - DNA, 20 bp, synthetic construct
  source 1..20: mol_type = other DNA
ggcctgaaagtcaacattga

SEQ ID NO: 13077 - DNA, 20 bp, synthetic construct
  source 1..20: mol_type = other DNA
aagtcaacattgatggtact

SEQ ID NO: 13078 - DNA, 20 bp, synthetic construct
  source 1..20: mol_type = other DNA
actaggaatgcccaggttct

SEQ ID NO: 13079 - DNA, 20 bp, synthetic construct
  source 1..20: mol_type = other DNA
gcactcaggaacttcatgcc

SEQ ID NO: 13080 - DNA, 20 bp, synthetic construct
  source 1..20: mol_type = other DNA
gaacttcatgccaggcggtg

SEQ ID NO: 13081 - DNA, 20 bp, synthetic construct
  source 1..20: mol_type = other DNA
gccaggcggtgtggaattcg

SEQ ID NO: 13082 - DNA, 20 bp, synthetic construct
  source 1..20: mol_type = other DNA
ttataggtgcatcgttcctc

SEQ ID NO: 13083 - DNA, 20 bp, synthetic construct
  source 1..20: mol_type = other DNA
tataggtgcatcgttcctca

SEQ ID NO: 13084 - DNA, 20 bp, synthetic construct
  source 1..20: mol_type = other DNA
caaagacgccaataaccatc

SEQ ID NO: 13085 - DNA, 20 bp, synthetic construct
  source 1..20: mol_type = other DNA
caataaccatctggagtcca

SEQ ID NO: 13086 - DNA, 20 bp, synthetic construct
  source 1..20: mol_type = other DNA
ggagtccacggtgatcacta

SEQ ID NO: 13087 - DNA, 20 bp, synthetic construct
  source 1..20: mol_type = other DNA
tgaaacacaacctactaccc

SEQ ID NO: 13088 - DNA, 20 bp, synthetic construct
  source 1..20: mol_type = other DNA
cgtggcggttcatccctggc

SEQ ID NO: 13089 - DNA, 20 bp, synthetic construct
  source 1..20: mol_type = other DNA
ttacataaagttgggcacac

SEQ ID NO: 13090 - DNA, 20 bp, synthetic construct
  source 1..20: mol_type = other DNA
ttggccgctaggctccatga

SEQ ID NO: 13091 - DNA, 20 bp, synthetic construct
  source 1..20: mol_type = other DNA
gatgaatgattccacgatag

SEQ ID NO: 13092 - DNA, 20 bp, synthetic construct
  source 1..20: mol_type = other DNA
ctctgatccgctgataagca

SEQ ID NO: 13093 - DNA, 20 bp, synthetic construct
  source 1..20: mol_type = other DNA
tgagacacggactgcaatcg

SEQ ID NO: 13094 - DNA, 20 bp, synthetic construct
  source 1..20: mol_type = other DNA
cacggactgcaatcgaggat

SEQ ID NO: 13095 - DNA, 20 bp, synthetic construct
  source 1..20: mol_type = other DNA
cagaaggaggcggccaatat

SEQ ID NO: 13096 - DNA, 20 bp, synthetic construct
  source 1..20: mol_type = other DNA
ggcggccaatatgggctatc

SEQ ID NO: 13097 - DNA, 20 bp, synthetic construct
  source 1..20: mol_type = other DNA
tatcaggagctgcggcgaag

SEQ ID NO: 13098 - DNA, 20 bp, synthetic construct
  source 1..20: mol_type = other DNA
aggagctgcggcgaagtgga

SEQ ID NO: 13099 - DNA, 20 bp, synthetic construct
  source 1..20: mol_type = other DNA
ggagctgcggcgaagtggaa

SEQ ID NO: 13100 - DNA, 20 bp, synthetic construct
  source 1..20: mol_type = other DNA
tgccgggcctgtccctacta

SEQ ID NO: 13101 - DNA, 20 bp, synthetic construct
  source 1..20: mol_type = other DNA
gtccctactacggcagactc

SEQ ID NO: 13102 - DNA, 20 bp, synthetic construct
  source 1..20: mol_type = other DNA
ctaccaatcctccacgctac

SEQ ID NO: 13103 - DNA, 20 bp, synthetic construct
  source 1..20: mol_type = other DNA
ctatctgcgagaaggcatag

SEQ ID NO: 13104 - DNA, 20 bp, synthetic construct
  source 1..20: mol_type = other DNA
ctgcgagaaggcatagaggc

SEQ ID NO: 13105 - DNA, 20 bp, synthetic construct
  source 1..20: mol_type = other DNA
aatggtagccgcgcccaaat

SEQ ID NO: 13106 - DNA, 20 bp, synthetic construct
  source 1..20: mol_type = other DNA
attcacccgtgatattaaac

SEQ ID NO: 13107 - DNA, 20 bp, synthetic construct
  source 1..20: mol_type = other DNA
cagggagctatacgcggagt

SEQ ID NO: 13108 - DNA, 20 bp, synthetic construct
  source 1..20: mol_type = other DNA
tacgcggagttggtagacca

SEQ ID NO: 13109 - DNA, 20 bp, synthetic construct
  source 1..20: mol_type = other DNA
cgcggagttggtagaccaag

SEQ ID NO: 13110 - DNA, 20 bp, synthetic construct
  source 1..20: mol_type = other DNA
tcactcaaccctgccgcgac

SEQ ID NO: 13111 - DNA, 20 bp, synthetic construct
  source 1..20: mol_type = other DNA
agaggttccggaactaaacg

SEQ ID NO: 13112 - DNA, 20 bp, synthetic construct
  source 1..20: mol_type = other DNA
atgcagaccgctgaacaagc

SEQ ID NO: 13113 - DNA, 20 bp, synthetic construct
  source 1..20: mol_type = other DNA
gcctatccgataaactggat

SEQ ID NO: 13114 - DNA, 20 bp, synthetic construct
  source 1..20: mol_type = other DNA
cctatccgataaactggatc

SEQ ID NO: 13115 - DNA, 20 bp, synthetic construct
  source 1..20: mol_type = other DNA
ctatccgataaactggatcg

SEQ ID NO: 13116 - DNA, 20 bp, synthetic construct
  source 1..20: mol_type = other DNA
gcacgtcacgccatacgcta

SEQ ID NO: 13117 - DNA, 20 bp, synthetic construct
  source 1..20: mol_type = other DNA
cgccatacgctatggtacgc

SEQ ID NO: 13118 - DNA, 20 bp, synthetic construct
  source 1..20: mol_type = other DNA
gccatacgctatggtacgca

SEQ ID NO: 13119 - DNA, 20 bp, synthetic construct
  source 1..20: mol_type = other DNA
cccgcagcgagagacttcct

SEQ ID NO: 13120 - DNA, 20 bp, synthetic construct
  source 1..20: mol_type = other DNA
cagcgagagacttccttgga

SEQ ID NO: 13121 - DNA, 20 bp, synthetic construct
  source 1..20: mol_type = other DNA
ggttcgacacatggtataaa

SEQ ID NO: 13122 - DNA, 20 bp, synthetic construct
  source 1..20: mol_type = other DNA
gccttaccaggtgtcggacc

SEQ ID NO: 13123 - DNA, 20 bp, synthetic construct
  source 1..20: mol_type = other DNA
ttgcaagattggacaacccg

SEQ ID NO: 13124 - DNA, 20 bp, synthetic construct
  source 1..20: mol_type = other DNA
tggacaacccgtggtgttgg

SEQ ID NO: 13125 - DNA, 20 bp, synthetic construct
  source 1..20: mol_type = other DNA
gtgttggcgggccttatccc

SEQ ID NO: 13126 - DNA, 20 bp, synthetic construct
  source 1..20: mol_type = other DNA
tgttgccattgatattcatc

SEQ ID NO: 13127 - DNA, 20 bp, synthetic construct
  source 1..20: mol_type = other DNA
gttgccattgatattcatca

SEQ ID NO: 13128 - DNA, 20 bp, synthetic construct
  source 1..20: mol_type = other DNA
gacgcccatggaaaggctgt

SEQ ID NO: 13129 - DNA, 20 bp, synthetic construct
  source 1..20: mol_type = other DNA
caacgcgatggccgaagcta

SEQ ID NO: 13130 - DNA, 20 bp, synthetic construct
  source 1..20: mol_type = other DNA
gcacaatcttaagtggagaa

SEQ ID NO: 13131 - DNA, 20 bp, synthetic construct
  source 1..20: mol_type = other DNA
tactggcctggatatgccaa

SEQ ID NO: 13132 - DNA, 20 bp, synthetic construct
  source 1..20: mol_type = other DNA
ccaagaattaccgcacatat

SEQ ID NO: 13133 - DNA, 20 bp, synthetic construct
  source 1..20: mol_type = other DNA
ttaccgcacatatgggaaag

SEQ ID NO: 13134 - DNA, 20 bp, synthetic construct
  source 1..20: mol_type = other DNA
ttcatgtggatatgcatcta

SEQ ID NO: 13135 - DNA, 20 bp, synthetic construct
  source 1..20: mol_type = other DNA
aaataattaaccctcatagg

SEQ ID NO: 13136 - DNA, 20 bp, synthetic construct
  source 1..20: mol_type = other DNA
gtgatgaaggccgcaatacg

SEQ ID NO: 13137 - DNA, 20 bp, synthetic construct
  source 1..20: mol_type = other DNA
attgttgccaacaatacatg

SEQ ID NO: 13138 - DNA, 20 bp, synthetic construct
  source 1..20: mol_type = other DNA
ttcataagatacttatacac

SEQ ID NO: 13139 - DNA, 20 bp, synthetic construct
  source 1..20: mol_type = other DNA
gccgctaacatcatcgccag

SEQ ID NO: 13140 - DNA, 20 bp, synthetic construct
  source 1..20: mol_type = other DNA
aacatcatcgccagaggagc

SEQ ID NO: 13141 - DNA, 20 bp, synthetic construct
  source 1..20: mol_type = other DNA
tatattgggcgacataatgt

SEQ ID NO: 13142 - DNA, 20 bp, synthetic construct
  source 1..20: mol_type = other DNA
gcgacataatgttggtaaat

SEQ ID NO: 13143 - DNA, 20 bp, synthetic construct
  source 1..20: mol_type = other DNA
ctacgatcattaaagataca

SEQ ID NO: 13144 - DNA, 20 bp, synthetic construct
  source 1..20: mol_type = other DNA
gtgatctgccaaatataggt

SEQ ID NO: 13145 - DNA, 20 bp, synthetic construct
  source 1..20: mol_type = other DNA
tggaatacttattaccatcg

SEQ ID NO: 13146 - DNA, 20 bp, synthetic construct
  source 1..20: mol_type = other DNA
ggaatacttattaccatcga

SEQ ID NO: 13147 - DNA, 20 bp, synthetic construct
  source 1..20: mol_type = other DNA
attaccatcgagggaatcaa

SEQ ID NO: 13148 - DNA, 20 bp, synthetic construct
  source 1..20: mol_type = other DNA
catcgagggaatcaatggtg

SEQ ID NO: 13149 - DNA, 20 bp, synthetic construct
  source 1..20: mol_type = other DNA
atcgagggaatcaatggtgt

SEQ ID NO: 13150 - DNA, 20 bp, synthetic construct
  source 1..20: mol_type = other DNA
cctaatccagacacgaccac

SEQ ID NO: 13151 - DNA, 20 bp, synthetic construct
  source 1..20: mol_type = other DNA
aatccagacacgaccaccgg

SEQ ID NO: 13152 - DNA, 20 bp, synthetic construct
  source 1..20: mol_type = other DNA
caccggtggccttatattgc

SEQ ID NO: 13153 - DNA, 20 bp, synthetic construct
  source 1..20: mol_type = other DNA
ttagcatatgctcaagcaga

SEQ ID NO: 13154 - DNA, 20 bp, synthetic construct
  source 1..20: mol_type = other DNA
tattccggcaactcttaata

SEQ ID NO: 13155 - DNA, 20 bp, synthetic construct
  source 1..20: mol_type = other DNA
tgaataggctctcctgttgc

SEQ ID NO: 13156 - DNA, 20 bp, synthetic construct
  source 1..20: mol_type = other DNA
gggttatggccctggcgagc

SEQ ID NO: 13157 - DNA, 20 bp, synthetic construct
  source 1..20: mol_type = other DNA
aacgacggtgaacttgattc

SEQ ID NO: 13158 - DNA, 20 bp, synthetic construct
  source 1..20: mol_type = other DNA
acgacggtgaacttgattcc

SEQ ID NO: 13159 - DNA, 20 bp, synthetic construct
  source 1..20: mol_type = other DNA
ctgggtatctgccgctacta

SEQ ID NO: 13160 - DNA, 20 bp, synthetic construct
  source 1..20: mol_type = other DNA
taaggagtaaagctcttgct

SEQ ID NO: 13161 - DNA, 20 bp, synthetic construct
  source 1..20: mol_type = other DNA
aagctcttgcttggtaattg

SEQ ID NO: 13162 - DNA, 20 bp, synthetic construct
  source 1..20: mol_type = other DNA
agctcttgcttggtaattgt

SEQ ID NO: 13163 - DNA, 20 bp, synthetic construct
  source 1..20: mol_type = other DNA
aatcaaagcttcgcaatcca

SEQ ID NO: 13164 - DNA, 20 bp, synthetic construct
  source 1..20: mol_type = other DNA
gaaataacatgctactgttg

SEQ ID NO: 13165 - DNA, 20 bp, synthetic construct
  source 1..20: mol_type = other DNA
cgtgcaaccttgggcattat

SEQ ID NO: 13166 - DNA, 20 bp, synthetic construct
  source 1..20: mol_type = other DNA
agattgaggcttcatggtat

SEQ ID NO: 13167 - DNA, 20 bp, synthetic construct
  source 1..20: mol_type = other DNA
agatgatgaatcaacgtctg

SEQ ID NO: 13168 - DNA, 20 bp, synthetic construct
  source 1..20: mol_type = other DNA
gatgatgaatcaacgtctgt

SEQ ID NO: 13169 - DNA, 20 bp, synthetic construct
  source 1..20: mol_type = other DNA
ttgtacaatgtctgtatagg

SEQ ID NO: 13170 - DNA, 20 bp, synthetic construct
  source 1..20: mol_type = other DNA
gacattgtgtacgagttgtt

SEQ ID NO: 13171 - DNA, 20 bp, synthetic construct
  source 1..20: mol_type = other DNA
atgcttgtacctgatagccg

SEQ ID NO: 13172 - DNA, 20 bp, synthetic construct
  source 1..20: mol_type = other DNA
cctgatagccgcggatagaa

SEQ ID NO: 13173 - DNA, 20 bp, synthetic construct
  source 1..20: mol_type = other DNA
ctcctgccgccgcagttcga

SEQ ID NO: 13174 - DNA, 20 bp, synthetic construct
  source 1..20: mol_type = other DNA
aggtgatatgatagcaaatt

SEQ ID NO: 13175 - DNA, 20 bp, synthetic construct
  source 1..20: mol_type = other DNA
ttcttctgccgccattctta

SEQ ID NO: 13176 - DNA, 20 bp, synthetic construct
  source 1..20: mol_type = other DNA
cattcttaaggcctcgttga

SEQ ID NO: 13177 - DNA, 20 bp, synthetic construct
  source 1..20: mol_type = other DNA
ttgaagtacatgcttaccca

SEQ ID NO: 13178 - DNA, 20 bp, synthetic construct
  source 1..20: mol_type = other DNA
tgaagtacatgcttacccaa

SEQ ID NO: 13179 - DNA, 20 bp, synthetic construct
  source 1..20: mol_type = other DNA
tgaatagagcagcatctacc

SEQ ID NO: 13180 - DNA, 20 bp, synthetic construct
  source 1..20: mol_type = other DNA
aggcccgcgattctacagca

SEQ ID NO: 13181 - DNA, 20 bp, synthetic construct
  source 1..20: mol_type = other DNA
cagaagcatgcgaactacat

SEQ ID NO: 13182 - DNA, 20 bp, synthetic construct
  source 1..20: mol_type = other DNA
catgttggagaaggcatata

SEQ ID NO: 13183 - DNA, 20 bp, synthetic construct
  source 1..20: mol_type = other DNA
gaatatgccagtcctgaatt

SEQ ID NO: 13184 - DNA, 20 bp, synthetic construct
  source 1..20: mol_type = other DNA
cttccgacagaggtcctgta

SEQ ID NO: 13185 - DNA, 20 bp, synthetic construct
  source 1..20: mol_type = other DNA
cgtgtaccctatagataata

SEQ ID NO: 13186 - DNA, 20 bp, synthetic construct
  source 1..20: mol_type = other DNA
ggacacattcatcttatcaa

SEQ ID NO: 13187 - DNA, 20 bp, synthetic construct
  source 1..20: mol_type = other DNA
tgtcgtgacagtcttcgatt

SEQ ID NO: 13188 - DNA, 20 bp, synthetic construct
  source 1..20: mol_type = other DNA
ggtcatagagcttacgtatt

SEQ ID NO: 13189 - DNA, 20 bp, synthetic construct
  source 1..20: mol_type = other DNA
actctccaaagctcctatga

SEQ ID NO: 13190 - DNA, 20 bp, synthetic construct
  source 1..20: mol_type = other DNA
cattcttagagcttcattga

SEQ ID NO: 13191 - DNA, 20 bp, synthetic construct
  source 1..20: mol_type = other DNA
attcttagagcttcattgat

SEQ ID NO: 13192 - DNA, 20 bp, synthetic construct
  source 1..20: mol_type = other DNA
ccggacgaatgtcaaactca

SEQ ID NO: 13193 - DNA, 20 bp, synthetic construct
  source 1..20: mol_type = other DNA
acttatgaatcaggtcgtaa

SEQ ID NO: 13194 - DNA, 20 bp, synthetic construct
  source 1..20: mol_type = other DNA
gagctcctacgacggcgtag

SEQ ID NO: 13195 - DNA, 20 bp, synthetic construct
  source 1..20: mol_type = other DNA
agctcctacgacggcgtagc

SEQ ID NO: 13196 - DNA, 20 bp, synthetic construct
  source 1..20: mol_type = other DNA
gctcctacgacggcgtagcg

SEQ ID NO: 13197 - DNA, 20 bp, synthetic construct
  source 1..20: mol_type = other DNA
gagtgcttcattgatatgga

SEQ ID NO: 13198 - DNA, 20 bp, synthetic construct
  source 1..20: mol_type = other DNA
agtgcttcattgatatggat

SEQ ID NO: 13199 - DNA, 20 bp, synthetic construct
  source 1..20: mol_type = other DNA
gttcctgttgaacaagtatc

SEQ ID NO: 13200 - DNA, 20 bp, synthetic construct
  source 1..20: mol_type = other DNA
ggttcttctcgatacgctga

SEQ ID NO: 13201 - DNA, 20 bp, synthetic construct
  source 1..20: mol_type = other DNA
gttcttctcgatacgctgaa

SEQ ID NO: 13202 - DNA, 20 bp, synthetic construct
  source 1..20: mol_type = other DNA
cacaaagtggaggagccctt

SEQ ID NO: 13203 - DNA, 20 bp, synthetic construct
  source 1..20: mol_type = other DNA
ttgcgttagcaacgtagctt

SEQ ID NO: 13204 - DNA, 20 bp, synthetic construct
  source 1..20: mol_type = other DNA
agtcagatccctcttggaga

SEQ ID NO: 13205 - DNA, 20 bp, synthetic construct
  source 1..20: mol_type = other DNA
ggacatcatacctctgccat

SEQ ID NO: 13206 - DNA, 20 bp, synthetic construct
  source 1..20: mol_type = other DNA
taggcatgctagttcaaata

SEQ ID NO: 13207 - DNA, 20 bp, synthetic construct
  source 1..20: mol_type = other DNA
ctctcatagacagctcttct

SEQ ID NO: 13208 - DNA, 20 bp, synthetic construct
  source 1..20: mol_type = other DNA
gtattcgcgtcttgaatcaa

SEQ ID NO: 13209 - DNA, 20 bp, synthetic construct
  source 1..20: mol_type = other DNA
ggtcatattgatcaccctgc

SEQ ID NO: 13210 - DNA, 20 bp, synthetic construct
  source 1..20: mol_type = other DNA
cgccattcttaaggcctcgt

SEQ ID NO: 13211 - DNA, 20 bp, synthetic construct
  source 1..20: mol_type = other DNA
gatcccgtcgtatgagtatg

SEQ ID NO: 13212 - DNA, 20 bp, synthetic construct
  source 1..20: mol_type = other DNA
gtcgtctcctatgcgttgaa

SEQ ID NO: 13213 - DNA, 20 bp, synthetic construct
  source 1..20: mol_type = other DNA
tattactgttgcgtcgcctt

SEQ ID NO: 13214 - DNA, 20 bp, synthetic construct
  source 1..20: mol_type = other DNA
attactgttgcgtcgcctta

SEQ ID NO: 13215 - DNA, 20 bp, synthetic construct
  source 1..20: mol_type = other DNA
ttactgttgcgtcgccttag

SEQ ID NO: 13216 - DNA, 20 bp, synthetic construct
  source 1..20: mol_type = other DNA
tcttgatgtggcgttaatca

SEQ ID NO: 13217 - DNA, 20 bp, synthetic construct
  source 1..20: mol_type = other DNA
aataaggctgttcaccgaat

SEQ ID NO: 13218 - DNA, 20 bp, synthetic construct
  source 1..20: mol_type = other DNA
ataaggctgttcaccgaatg

SEQ ID NO: 13219 - DNA, 20 bp, synthetic construct
  source 1..20: mol_type = other DNA
caggagctgtgtcgaaagtt

SEQ ID NO: 13220 - DNA, 20 bp, synthetic construct
  source 1..20: mol_type = other DNA
cgaaagttaggagctaaaga

SEQ ID NO: 13221 - DNA, 20 bp, synthetic construct
  source 1..20: mol_type = other DNA
gttggaagctctaaatgtgc

SEQ ID NO: 13222 - DNA, 20 bp, synthetic construct
  source 1..20: mol_type = other DNA
tgaacatattcgttaaatac

SEQ ID NO: 13223 - DNA, 20 bp, synthetic construct
  source 1..20: mol_type = other DNA
ataactacatgctagcttat

SEQ ID NO: 13224 - DNA, 20 bp, synthetic construct
  source 1..20: mol_type = other DNA
taataagactacactaaacc

SEQ ID NO: 13225 - DNA, 20 bp, synthetic construct
  source 1..20: mol_type = other DNA
aaggatgctgagctacggaa

SEQ ID NO: 13226 - DNA, 20 bp, synthetic construct
  source 1..20: mol_type = other DNA
atggaatgggctgcgaccca

SEQ ID NO: 13227 - DNA, 20 bp, synthetic construct
  source 1..20: mol_type = other DNA
ctgttacacactcggaggta

SEQ ID NO: 13228 - DNA, 20 bp, synthetic construct
  source 1..20: mol_type = other DNA
atattcaaataaacaatccc

SEQ ID NO: 13229 - DNA, 20 bp, synthetic construct
  source 1..20: mol_type = other DNA
tgggaagccgaccatataaa

SEQ ID NO: 13230 - DNA, 20 bp, synthetic construct
  source 1..20: mol_type = other DNA
atccgcacccattcttatca

SEQ ID NO: 13231 - DNA, 20 bp, synthetic construct
  source 1..20: mol_type = other DNA
tgacacggacgttgttatcc

SEQ ID NO: 13232 - DNA, 20 bp, synthetic construct
  source 1..20: mol_type = other DNA
acacggacgttgttatcctg

SEQ ID NO: 13233 - DNA, 20 bp, synthetic construct
  source 1..20: mol_type = other DNA
gagcttcacctgaatatgcg

SEQ ID NO: 13234 - DNA, 20 bp, synthetic construct
  source 1..20: mol_type = other DNA
gcgtctgacgatgtcgtata

SEQ ID NO: 13235 - DNA, 20 bp, synthetic construct
  source 1..20: mol_type = other DNA
ttcaacaaatctgcgtgaac

SEQ ID NO: 13236 - DNA, 20 bp, synthetic construct
  source 1..20: mol_type = other DNA
tagcacagatgatgagatat

SEQ ID NO: 13237 - DNA, 20 bp, synthetic construct
  source 1..20: mol_type = other DNA
cgaatactggtgcgcctaca

SEQ ID NO: 13238 - DNA, 20 bp, synthetic construct
  source 1..20: mol_type = other DNA
aagcatgtctggtgtcccgt

SEQ ID NO: 13239 - DNA, 20 bp, synthetic construct
  source 1..20: mol_type = other DNA
caggtctcaagccagctcgt

SEQ ID NO: 13240 - DNA, 20 bp, synthetic construct
  source 1..20: mol_type = other DNA
cgttggacaacttcatccaa

SEQ ID NO: 13241 - DNA, 20 bp, synthetic construct
  source 1..20: mol_type = other DNA
ctgctggccaatcaggtctt

SEQ ID NO: 13242 - DNA, 20 bp, synthetic construct
  source 1..20: mol_type = other DNA
ttaggactacctactcaggc

SEQ ID NO: 13243 - DNA, 20 bp, synthetic construct
  source 1..20: mol_type = other DNA
aaccagtgcacatatagtga

SEQ ID NO: 13244 - DNA, 20 bp, synthetic construct
  source 1..20: mol_type = other DNA
aaatgggcattaccatgtta

SEQ ID NO: 13245 - DNA, 20 bp, synthetic construct
  source 1..20: mol_type = other DNA
tcacaatcgtccacaccgat

SEQ ID NO: 13246 - DNA, 20 bp, synthetic construct
  source 1..20: mol_type = other DNA
cacaatcgtccacaccgatt

SEQ ID NO: 13247 - DNA, 20 bp, synthetic construct
  source 1..20: mol_type = other DNA
atcgtccacaccgattggga

SEQ ID NO: 13248 - DNA, 20 bp, synthetic construct
  source 1..20: mol_type = other DNA
tacctcggcttgctgctagc

SEQ ID NO: 13249 - DNA, 20 bp, synthetic construct
  source 1..20: mol_type = other DNA
agctggtctaactagtctac

SEQ ID NO: 13250 - DNA, 20 bp, synthetic construct
  source 1..20: mol_type = other DNA
gaccgacaatctcctggaag

SEQ ID NO: 13251 - DNA, 20 bp, synthetic construct
  source 1..20: mol_type = other DNA
acaggagcatagctatccca

SEQ ID NO: 13252 - DNA, 20 bp, synthetic construct
  source 1..20: mol_type = other DNA
cagtgtaaatatattagaga

SEQ ID NO: 13253 - DNA, 20 bp, synthetic construct
  source 1..20: mol_type = other DNA
actgtcaagatggtatctgt

SEQ ID NO: 13254 - DNA, 20 bp, synthetic construct
  source 1..20: mol_type = other DNA
tggcagaaattgttaaccta

SEQ ID NO: 13255 - DNA, 20 bp, synthetic construct
  source 1..20: mol_type = other DNA
taatcgagcaatgttaatct

SEQ ID NO: 13256 - DNA, 20 bp, synthetic construct
  source 1..20: mol_type = other DNA
ttcccaacctgtacagtcat

SEQ ID NO: 13257 - DNA, 20 bp, synthetic construct
  source 1..20: mol_type = other DNA
ctatgggattcacttggaga

SEQ ID NO: 13258 - DNA, 20 bp, synthetic construct
  source 1..20: mol_type = other DNA
attgggagtgaattcacatg

SEQ ID NO: 13259 - DNA, 20 bp, synthetic construct
  source 1..20: mol_type = other DNA
cgcattaatgaaagctgtgc

SEQ ID NO: 13260 - DNA, 20 bp, synthetic construct
  source 1..20: mol_type = other DNA
tagcttagtcactgtcaata

SEQ ID NO: 13261 - DNA, 20 bp, synthetic construct
  source 1..20: mol_type = other DNA
ctgtcaatacggagcatact

SEQ ID NO: 13262 - DNA, 20 bp, synthetic construct
  source 1..20: mol_type = other DNA
acgaaatgctagctaggtta

SEQ ID NO: 13263 - DNA, 20 bp, synthetic construct
  source 1..20: mol_type = other DNA
agctaggttatggtatagta

SEQ ID NO: 13264 - DNA, 20 bp, synthetic construct
  source 1..20: mol_type = other DNA
aaagattggcggctaatatg

SEQ ID NO: 13265 - DNA, 20 bp, synthetic construct
  source 1..20: mol_type = other DNA
aagattggcggctaatatgt

SEQ ID NO: 13266 - DNA, 20 bp, synthetic construct
  source 1..20: mol_type = other DNA
ggctaacatcaatcgggcaa

SEQ ID NO: 13267 - DNA, 20 bp, synthetic construct
  source 1..20: mol_type = other DNA
caatcgggcaatggttactt

SEQ ID NO: 13268 - DNA, 20 bp, synthetic construct
  source 1..20: mol_type = other DNA
acgaaatgctaactaggtat

SEQ ID NO: 13269 - DNA, 20 bp, synthetic construct
  source 1..20: mol_type = other DNA
aactaggtattggtatagta

SEQ ID NO: 13270 - DNA, 20 bp, synthetic construct
  source 1..20: mol_type = other DNA
aagattggcggttaatatgt

SEQ ID NO: 13271 - DNA, 20 bp, synthetic construct
  source 1..20: mol_type = other DNA
agattggcggttaatatgtg

SEQ ID NO: 13272 - DNA, 20 bp, synthetic construct
  source 1..20: mol_type = other DNA
tgttgggagctgacattaat

SEQ ID NO: 13273 - DNA, 20 bp, synthetic construct
  source 1..20: mol_type = other DNA
taatcgggcaatgattacct

SEQ ID NO: 13274 - DNA, 20 bp, synthetic construct
  source 1..20: mol_type = other DNA
tagcgagtcaaacgaataat

SEQ ID NO: 13275-20000 - skipped (6726 entries)

SEQ ID NO: 20001 - RNA, 20 nt, synthetic construct
  source 1..20: mol_type = other RNA
gcttgcacaggtgtctacat

SEQ ID NO: 20002 - RNA, 20 nt, synthetic construct
  source 1..20: mol_type = other RNA
atacacgccttcaaacaaca

SEQ ID NO: 20003 - RNA, 20 nt, synthetic construct
  source 1..20: mol_type = other RNA
atctgcacaagtgcttgcac

SEQ ID NO: 20004 - RNA, 20 nt, synthetic construct
  source 1..20: mol_type = other RNA
aaatattcttgcgattgatc

SEQ ID NO: 20005 - RNA, 20 nt, synthetic construct
  source 1..20: mol_type = other RNA
ccaccaccatacacgatatc

SEQ ID NO: 20006 - RNA, 20 nt, synthetic construct
  source 1..20: mol_type = other RNA
cctgatatcgtgtatggtgg

SEQ ID NO: 20007 - RNA, 20 nt, synthetic construct
  source 1..20: mol_type = other RNA
cgcgctgccttcaaacaaca

SEQ ID NO: 20008 - RNA, 20 nt, synthetic construct
  source 1..20: mol_type = other RNA
cgtgaatcaacacattattg

SEQ ID NO: 20009 - RNA, 20 nt, synthetic construct
  source 1..20: mol_type = other RNA
ctacctgatatcgtgtatgg

SEQ ID NO: 20010 - RNA, 20 nt, synthetic construct
  source 1..20: mol_type = other RNA
gcgtgaatcaacacattatt

SEQ ID NO: 20011 - RNA, 20 nt, synthetic construct
  source 1..20: mol_type = other RNA
ggcgtgaatcaacacattat

SEQ ID NO: 20012 - RNA, 20 nt, synthetic construct
  source 1..20: mol_type = other RNA
tggatcattggactaccaag

SEQ ID NO: 20013 - RNA, 20 nt, synthetic construct
  source 1..20: mol_type = other RNA
ttaggtgcaacatggatcat

SEQ ID NO: 20014 - RNA, 20 nt, synthetic construct
  source 1..20: mol_type = other RNA
cagctcctaaatctatacaa

SEQ ID NO: 20015 - RNA, 20 nt, synthetic construct
  source 1..20: mol_type = other RNA
caagtatgatgaatcgtaat

SEQ ID NO: 20016 - RNA, 20 nt, synthetic construct
  source 1..20: mol_type = other RNA
aagtatgatgaatcgtaatt

SEQ ID NO: 20017 - RNA, 20 nt, synthetic construct
  source 1..20: mol_type = other RNA
agtatgatgaatcgtaattg

SEQ ID NO: 20018 - RNA, 20 nt, synthetic construct
  source 1..20: mol_type = other RNA
agtggagagcattgtgttcg

SEQ ID NO: 20019 - RNA, 20 nt, synthetic construct
  source 1..20: mol_type = other RNA
gaaccgatgactgtacaggt

SEQ ID NO: 20020 - RNA, 20 nt, synthetic construct
  source 1..20: mol_type = other RNA
aaccgatgactgtacaggtt

SEQ ID NO: 20021 - RNA, 20 nt, synthetic construct
  source 1..20: mol_type = other RNA
tgtacaggttgggaatatgt

SEQ ID NO: 20022 - RNA, 20 nt, synthetic construct
  source 1..20: mol_type = other RNA
atataataatccacatcacc

SEQ ID NO: 20023 - RNA, 20 nt, synthetic construct
  source 1..20: mol_type = other RNA
catcacccggttcttaaata

SEQ ID NO: 20024 - RNA, 20 nt, synthetic construct
  source 1..20: mol_type = other RNA
cccggttcttaaatatggta

SEQ ID NO: 20025 - RNA, 20 nt, synthetic construct
  source 1..20: mol_type = other RNA
taacattgctcgattagcgt

SEQ ID NO: 20026 - RNA, 20 nt, synthetic construct
  source 1..20: mol_type = other RNA
cgctatgccataccaatatt

SEQ ID NO: 20027 - RNA, 20 nt, synthetic construct
  source 1..20: mol_type = other RNA
actctccatacagcatcagt

SEQ ID NO: 20028 - RNA, 20 nt, synthetic construct
  source 1..20: mol_type = other RNA
ctctccatacagcatcagtt

SEQ ID NO: 20029 - RNA, 20 nt, synthetic construct
  source 1..20: mol_type = other RNA
agtcccaacagaatctacaa

SEQ ID NO: 20030 - RNA, 20 nt, synthetic construct
  source 1..20: mol_type = other RNA
gtgaatcatacagtgttcca

SEQ ID NO: 20031 - RNA, 20 nt, synthetic construct
  source 1..20: mol_type = other RNA
aatcggtgtggacgattgtg

SEQ ID NO: 20032 - RNA, 20 nt, synthetic construct
  source 1..20: mol_type = other RNA
tgtggacgattgtgaggtac

SEQ ID NO: 20033 - RNA, 20 nt, synthetic construct
  source 1..20: mol_type = other RNA
tatccaagttcttcttgtgg

SEQ ID NO: 20034 - RNA, 20 nt, synthetic construct
  source 1..20: mol_type = other RNA
ctaagacctgattggccagc

SEQ ID NO: 20035 - RNA, 20 nt, synthetic construct
  source 1..20: mol_type = other RNA
gatgaagttgtccaacgagc

SEQ ID NO: 20036 - RNA, 20 nt, synthetic construct
  source 1..20: mol_type = other RNA
caacgagctggcttgagacc

SEQ ID NO: 20037 - RNA, 20 nt, synthetic construct
  source 1..20: mol_type = other RNA
ttgtaaggattccaagacca

SEQ ID NO: 20038 - RNA, 20 nt, synthetic construct
  source 1..20: mol_type = other RNA
cagtattcgagttcttcctc

SEQ ID NO: 20039 - RNA, 20 nt, synthetic construct
  source 1..20: mol_type = other RNA
tattcgagttcttcctctgg

SEQ ID NO: 20040 - RNA, 20 nt, synthetic construct
  source 1..20: mol_type = other RNA
gagttgacttgaaacctggc

SEQ ID NO: 20041 - RNA, 20 nt, synthetic construct
  source 1..20: mol_type = other RNA
attatacatagtgatcatag

SEQ ID NO: 20042 - RNA, 20 nt, synthetic construct
  source 1..20: mol_type = other RNA
aactagttccaaatgaatat

SEQ ID NO: 20043 - RNA, 20 nt, synthetic construct
  source 1..20: mol_type = other RNA
ttctggaattatacgatgtc

SEQ ID NO: 20044 - RNA, 20 nt, synthetic construct
  source 1..20: mol_type = other RNA
tatacgatgtcaggcttatc

SEQ ID NO: 20045 - RNA, 20 nt, synthetic construct
  source 1..20: mol_type = other RNA
cttatctggacataacgtac

SEQ ID NO: 20046 - RNA, 20 nt, synthetic construct
  source 1..20: mol_type = other RNA
ggataacaacgtccgtgtca

SEQ ID NO: 20047 - RNA, 20 nt, synthetic construct
  source 1..20: mol_type = other RNA
gtagccctaaatggtataaa

SEQ ID NO: 20048 - RNA, 20 nt, synthetic construct
  source 1..20: mol_type = other RNA
cttgttaaatgtcgtgaatg

SEQ ID NO: 20049 - RNA, 20 nt, synthetic construct
  source 1..20: mol_type = other RNA
ttgttaaatgtcgtgaatgt

SEQ ID NO: 20050 - RNA, 20 nt, synthetic construct
  source 1..20: mol_type = other RNA
gttgataccttgataagaat

SEQ ID NO: 20051 - RNA, 20 nt, synthetic construct
  source 1..20: mol_type = other RNA
taccttgataagaatgggtg

SEQ ID NO: 20052 - RNA, 20 nt, synthetic construct
  source 1..20: mol_type = other RNA
gtaccatgttgctgtctgtt

SEQ ID NO: 20053 - RNA, 20 nt, synthetic construct
  source 1..20: mol_type = other RNA
acagtagtgacataagctaa

SEQ ID NO: 20054 - RNA, 20 nt, synthetic construct
  source 1..20: mol_type = other RNA
atagttataattcttgcgac

SEQ ID NO: 20055 - RNA, 20 nt, synthetic construct
  source 1..20: mol_type = other RNA
tacaacgattaggactgtat

SEQ ID NO: 20056 - RNA, 20 nt, synthetic construct
  source 1..20: mol_type = other RNA
acgaccacatactcatacga

SEQ ID NO: 20057 - RNA, 20 nt, synthetic construct
  source 1..20: mol_type = other RNA
cgaccacatactcatacgac

SEQ ID NO: 20058 - RNA, 20 nt, synthetic construct
  source 1..20: mol_type = other RNA
caccaacgaggccttaagaa

SEQ ID NO: 20059 - RNA, 20 nt, synthetic construct
  source 1..20: mol_type = other RNA
aacgaggccttaagaatggc

SEQ ID NO: 20060 - RNA, 20 nt, synthetic construct
  source 1..20: mol_type = other RNA
aaagctcttgttactgtgga

SEQ ID NO: 20061 - RNA, 20 nt, synthetic construct
  source 1..20: mol_type = other RNA
aatcttcattacgccgtcat

SEQ ID NO: 20062 - RNA, 20 nt, synthetic construct
  source 1..20: mol_type = other RNA
agaggtatgatgtccttaaa

SEQ ID NO: 20063 - RNA, 20 nt, synthetic construct
  source 1..20: mol_type = other RNA
ctcgagaagacagcggccaa

SEQ ID NO: 20064 - RNA, 20 nt, synthetic construct
  source 1..20: mol_type = other RNA
gatagagtatgagtccacct

SEQ ID NO: 20065 - RNA, 20 nt, synthetic construct
  source 1..20: mol_type = other RNA
gacgaaagtgaggacgatca

SEQ ID NO: 20066 - RNA, 20 nt, synthetic construct
  source 1..20: mol_type = other RNA
tccggaaagagtcattaaga

SEQ ID NO: 20067 - RNA, 20 nt, synthetic construct
  source 1..20: mol_type = other RNA
acaccataaagtacgaacat

SEQ ID NO: 20068 - RNA, 20 nt, synthetic construct
  source 1..20: mol_type = other RNA
aaacttattatacggcgaaa

SEQ ID NO: 20069 - RNA, 20 nt, synthetic construct
  source 1..20: mol_type = other RNA
ttgtaaggactgttacaaac

SEQ ID NO: 20070 - RNA, 20 nt, synthetic construct
  source 1..20: mol_type = other RNA
gactatgtattgcaactgtt

SEQ ID NO: 20071 - RNA, 20 nt, synthetic construct
  source 1..20: mol_type = other RNA
ggactgcactggcaagatca

SEQ ID NO: 20072 - RNA, 20 nt, synthetic construct
  source 1..20: mol_type = other RNA
ctcaaagtagcagcatcgga

SEQ ID NO: 20073 - RNA, 20 nt, synthetic construct
  source 1..20: mol_type = other RNA
tcgtagagctgttgttgtca

SEQ ID NO: 20074 - RNA, 20 nt, synthetic construct
  source 1..20: mol_type = other RNA
cgtagagctgttgttgtcat

SEQ ID NO: 20075 - RNA, 20 nt, synthetic construct
  source 1..20: mol_type = other RNA
caaccagatgctgttcgaac

SEQ ID NO: 20076 - RNA, 20 nt, synthetic construct
  source 1..20: mol_type = other RNA
gaatatacgttacaagtgct

SEQ ID NO: 20077 - RNA, 20 nt, synthetic construct
  source 1..20: mol_type = other RNA
acaagtgctagggctatact

SEQ ID NO: 20078 - RNA, 20 nt, synthetic construct
  source 1..20: mol_type = other RNA
ttaagaatcgcagcttcaga

SEQ ID NO: 20079 - RNA, 20 nt, synthetic construct
  source 1..20: mol_type = other RNA
atcgcagcttcagagggcaa

SEQ ID NO: 20080 - RNA, 20 nt, synthetic construct
  source 1..20: mol_type = other RNA
cagcttcagagggcaacggt

SEQ ID NO: 20081 - RNA, 20 nt, synthetic construct
  source 1..20: mol_type = other RNA
gtgatcataggagctctaga

SEQ ID NO: 20082 - RNA, 20 nt, synthetic construct
  source 1..20: mol_type = other RNA
tacgacctgattcataagta

SEQ ID NO: 20083 - RNA, 20 nt, synthetic construct
  source 1..20: mol_type = other RNA
agttatccaattgtgatatg

SEQ ID NO: 20084 - RNA, 20 nt, synthetic construct
  source 1..20: mol_type = other RNA
aaccctaatgttaaatgagc

SEQ ID NO: 20085 - RNA, 20 nt, synthetic construct
  source 1..20: mol_type = other RNA
ttcagcgactaggtctgtac

SEQ ID NO: 20086 - RNA, 20 nt, synthetic construct
  source 1..20: mol_type = other RNA
tcagcgactaggtctgtact

SEQ ID NO: 20087 - RNA, 20 nt, synthetic construct
  source 1..20: mol_type = other RNA
cgactatgtacttatacaac

SEQ ID NO: 20088 - RNA, 20 nt, synthetic construct
  source 1..20: mol_type = other RNA
tggtacaactcctattacta

SEQ ID NO: 20089 - RNA, 20 nt, synthetic construct
  source 1..20: mol_type = other RNA
ggtacaactcctattactat

SEQ ID NO: 20090 - RNA, 20 nt, synthetic construct
  source 1..20: mol_type = other RNA
acaactcctattactatggg

SEQ ID NO: 20091 - RNA, 20 nt, synthetic construct
  source 1..20: mol_type = other RNA
caactcctattactatggga

SEQ ID NO: 20092 - RNA, 20 nt, synthetic construct
  source 1..20: mol_type = other RNA
ttatgccatcataggagctt

SEQ ID NO: 20093 - RNA, 20 nt, synthetic construct
  source 1..20: mol_type = other RNA
tcttgaatgggctgccggca

SEQ ID NO: 20094 - RNA, 20 nt, synthetic construct
  source 1..20: mol_type = other RNA
cttgaatgggctgccggcat

SEQ ID NO: 20095 - RNA, 20 nt, synthetic construct
  source 1..20: mol_type = other RNA
aaatggctgcgcgagaatcg

SEQ ID NO: 20096 - RNA, 20 nt, synthetic construct
  source 1..20: mol_type = other RNA
aatggctgcgcgagaatcga

SEQ ID NO: 20097 - RNA, 20 nt, synthetic construct
  source 1..20: mol_type = other RNA
ggctgcgcgagaatcgaggg

SEQ ID NO: 20098 - RNA, 20 nt, synthetic construct
  source 1..20: mol_type = other RNA
tatactatgcgacataaaga

SEQ ID NO: 20099 - RNA, 20 nt, synthetic construct
  source 1..20: mol_type = other RNA
ttagcaagcatactctacaa

SEQ ID NO: 20100 - RNA, 20 nt, synthetic construct
  source 1..20: mol_type = other RNA
caagcatactctacaacggc

SEQ ID NO: 20101 - RNA, 20 nt, synthetic construct
  source 1..20: mol_type = other RNA
aagcatactctacaacggct

SEQ ID NO: 20102 - RNA, 20 nt, synthetic construct
  source 1..20: mol_type = other RNA
tggtacagctcttgttacta

SEQ ID NO: 20103 - RNA, 20 nt, synthetic construct
  source 1..20: mol_type = other RNA
ggtacagctcttgttactat

SEQ ID NO: 20104 - RNA, 20 nt, synthetic construct
  source 1..20: mol_type = other RNA
acagctcttgttactatggg

SEQ ID NO: 20105 - RNA, 20 nt, synthetic construct
  source 1..20: mol_type = other RNA
accatagccaaattcaggac

SEQ ID NO: 20106 - RNA, 20 nt, synthetic construct
  source 1..20: mol_type = other RNA
cttctgctaaatcgtcatat

SEQ ID NO: 20107 - RNA, 20 nt, synthetic construct
  source 1..20: mol_type = other RNA
gctaaatcgtcatattggta

SEQ ID NO: 20108 - RNA, 20 nt, synthetic construct
  source 1..20: mol_type = other RNA
tgagcccttaggcaagcatg

SEQ ID NO: 20109 - RNA, 20 nt, synthetic construct
  source 1..20: mol_type = other RNA
caagcatgtggttcaacggc

SEQ ID NO: 20110 - RNA, 20 nt, synthetic construct
  source 1..20: mol_type = other RNA
aagcatgtggttcaacggct

SEQ ID NO: 20111 - RNA, 20 nt, synthetic construct
  source 1..20: mol_type = other RNA
tcaacggctgggattatact

SEQ ID NO: 20112 - RNA, 20 nt, synthetic construct
  source 1..20: mol_type = other RNA
cggctgggattatactggga

SEQ ID NO: 20113 - RNA, 20 nt, synthetic construct
  source 1..20: mol_type = other RNA
ccatggttcacttaaacgag

SEQ ID NO: 20114 - RNA, 20 nt, synthetic construct
  source 1..20: mol_type = other RNA
catggttcacttaaacgagt

SEQ ID NO: 20115 - RNA, 20 nt, synthetic construct
  source 1..20: mol_type = other RNA
atacaaattgcagcctcgga

SEQ ID NO: 20116 - RNA, 20 nt, synthetic construct
  source 1..20: mol_type = other RNA
agtctacaatatgccatcat

SEQ ID NO: 20117 - RNA, 20 nt, synthetic construct
  source 1..20: mol_type = other RNA
tcataggagccttagagggc

SEQ ID NO: 20118 - RNA, 20 nt, synthetic construct
  source 1..20: mol_type = other RNA
ttaggctacatgcttcttct

SEQ ID NO: 20119 - RNA, 20 nt, synthetic construct
  source 1..20: mol_type = other RNA
tactccatgctgtagaatcg

SEQ ID NO: 20120 - RNA, 20 nt, synthetic construct
  source 1..20: mol_type = other RNA
actccatgctgtagaatcgc

SEQ ID NO: 20121 - RNA, 20 nt, synthetic construct
  source 1..20: mol_type = other RNA
ctgtagaatcgcgggcctcc

SEQ ID NO: 20122 - RNA, 20 nt, synthetic construct
  source 1..20: mol_type = other RNA
aagcatgtacttcaacaact

SEQ ID NO: 20123 - RNA, 20 nt, synthetic construct
  source 1..20: mol_type = other RNA
ttcaacaactagggctgtac

SEQ ID NO: 20124 - RNA, 20 nt, synthetic construct
  source 1..20: mol_type = other RNA
acaactagggctgtactgga

SEQ ID NO: 20125 - RNA, 20 nt, synthetic construct
  source 1..20: mol_type = other RNA
caactagggctgtactggaa

SEQ ID NO: 20126 - RNA, 20 nt, synthetic construct
  source 1..20: mol_type = other RNA
catggatctcttcaacgaat

SEQ ID NO: 20127 - RNA, 20 nt, synthetic construct
  source 1..20: mol_type = other RNA
ttaagaatggcggcagaaga

SEQ ID NO: 20128 - RNA, 20 nt, synthetic construct
  source 1..20: mol_type = other RNA
agtaaagctcttgttactgt

SEQ ID NO: 20129 - RNA, 20 nt, synthetic construct
  source 1..20: mol_type = other RNA
aatgacatcattagatggat

SEQ ID NO: 20130 - RNA, 20 nt, synthetic construct
  source 1..20: mol_type = other RNA
atcatatcaccttcgaactg

SEQ ID NO: 20131 - RNA, 20 nt, synthetic construct
  source 1..20: mol_type = other RNA
atatcaccttcgaactgcgg

SEQ ID NO: 20132 - RNA, 20 nt, synthetic construct
  source 1..20: mol_type = other RNA
caccttcgaactgcggcggc

SEQ ID NO: 20133 - RNA, 20 nt, synthetic construct
  source 1..20: mol_type = other RNA
cttcgaactgcggcggcagg

SEQ ID NO: 20134 - RNA, 20 nt, synthetic construct
  source 1..20: mol_type = other RNA
ccgttctatccgcggctatc

SEQ ID NO: 20135 - RNA, 20 nt, synthetic construct
  source 1..20: mol_type = other RNA
cggctatcaggtacaagcat

SEQ ID NO: 20136 - RNA, 20 nt, synthetic construct
  source 1..20: mol_type = other RNA
actgctactctatgctgtgc

SEQ ID NO: 20137 - RNA, 20 nt, synthetic construct
  source 1..20: mol_type = other RNA
aaatggctgcacgggaatcc

SEQ ID NO: 20138 - RNA, 20 nt, synthetic construct
  source 1..20: mol_type = other RNA
aaatgatctccaaagctgct

SEQ ID NO: 20139 - RNA, 20 nt, synthetic construct
  source 1..20: mol_type = other RNA
atgatctccaaagctgcttg

SEQ ID NO: 20140 - RNA, 20 nt, synthetic construct
  source 1..20: mol_type = other RNA
aataccatgaagcctcaatc

SEQ ID NO: 20141 - RNA, 20 nt, synthetic construct
  source 1..20: mol_type = other RNA
ctctaatatgctggtagcgg

SEQ ID NO: 20142 - RNA, 20 nt, synthetic construct
  source 1..20: mol_type = other RNA
taatatgctggtagcggagg

SEQ ID NO: 20143 - RNA, 20 nt, synthetic construct
  source 1..20: mol_type = other RNA
cgaatcataacgcggtaaac

SEQ ID NO: 20144 - RNA, 20 nt, synthetic construct
  source 1..20: mol_type = other RNA
aatcgaataaattcagatcc

SEQ ID NO: 20145 - RNA, 20 nt, synthetic construct
  source 1..20: mol_type = other RNA
cacctgcaatataaggccac

SEQ ID NO: 20146 - RNA, 20 nt, synthetic construct
  source 1..20: mol_type = other RNA
ctgcaatataaggccaccgg

SEQ ID NO: 20147 - RNA, 20 nt, synthetic construct
  source 1..20: mol_type = other RNA
ccggtggtcgtgtctggatt

SEQ ID NO: 20148 - RNA, 20 nt, synthetic construct
  source 1..20: mol_type = other RNA
cacaccattgattccctcga

SEQ ID NO: 20149 - RNA, 20 nt, synthetic construct
  source 1..20: mol_type = other RNA
ttccacgcatgattaataaa

SEQ ID NO: 20150 - RNA, 20 nt, synthetic construct
  source 1..20: mol_type = other RNA
tcctctggcgatgatgttag

SEQ ID NO: 20151 - RNA, 20 nt, synthetic construct
  source 1..20: mol_type = other RNA
tcatgaaacgactgcacgaa

SEQ ID NO: 20152 - RNA, 20 nt, synthetic construct
  source 1..20: mol_type = other RNA
catgaaacgactgcacgaat

SEQ ID NO: 20153 - RNA, 20 nt, synthetic construct
  source 1..20: mol_type = other RNA
gaatgctgcaatggtggaag

SEQ ID NO: 20154 - RNA, 20 nt, synthetic construct
  source 1..20: mol_type = other RNA
tgtcatggacgcattgaatg

SEQ ID NO: 20155 - RNA, 20 nt, synthetic construct
  source 1..20: mol_type = other RNA
cgtattgcggccttcatcac

SEQ ID NO: 20156 - RNA, 20 nt, synthetic construct
  source 1..20: mol_type = other RNA
gcatatccacatgaataccg

SEQ ID NO: 20157 - RNA, 20 nt, synthetic construct
  source 1..20: mol_type = other RNA
tcgcatctattgacaatcca

SEQ ID NO: 20158 - RNA, 20 nt, synthetic construct
  source 1..20: mol_type = other RNA
cccatatgtgcggtaattct

SEQ ID NO: 20159 - RNA, 20 nt, synthetic construct
  source 1..20: mol_type = other RNA
taggcttcttgaatacaggt

SEQ ID NO: 20160 - RNA, 20 nt, synthetic construct
  source 1..20: mol_type = other RNA
ggtcaagatcttcggcctgc

SEQ ID NO: 20161 - RNA, 20 nt, synthetic construct
  source 1..20: mol_type = other RNA
gccatcgcgttgcgaaacag

SEQ ID NO: 20162 - RNA, 20 nt, synthetic construct
  source 1..20: mol_type = other RNA
cgcgttgcgaaacagtggtt

SEQ ID NO: 20163 - RNA, 20 nt, synthetic construct
  source 1..20: mol_type = other RNA
gataaggcccgccaacacca

SEQ ID NO: 20164 - RNA, 20 nt, synthetic construct
  source 1..20: mol_type = other RNA
acgggttgtccaatcttgca

SEQ ID NO: 20165 - RNA, 20 nt, synthetic construct
  source 1..20: mol_type = other RNA
aggactccaggtccgacacc

SEQ ID NO: 20166 - RNA, 20 nt, synthetic construct
  source 1..20: mol_type = other RNA
tccaggtccgacacctggta

SEQ ID NO: 20167 - RNA, 20 nt, synthetic construct
  source 1..20: mol_type = other RNA
ccaaggaagtctctcgctgc

SEQ ID NO: 20168 - RNA, 20 nt, synthetic construct
  source 1..20: mol_type = other RNA
gaagtctctcgctgcgggta

SEQ ID NO: 20169 - RNA, 20 nt, synthetic construct
  source 1..20: mol_type = other RNA
gtctctcgctgcgggtaagg

SEQ ID NO: 20170 - RNA, 20 nt, synthetic construct
  source 1..20: mol_type = other RNA
gccctgcgtaccatagcgta

SEQ ID NO: 20171 - RNA, 20 nt, synthetic construct
  source 1..20: mol_type = other RNA
acaattctgacaccgatccg

SEQ ID NO: 20172 - RNA, 20 nt, synthetic construct
  source 1..20: mol_type = other RNA
caattctgacaccgatccgt

SEQ ID NO: 20173 - RNA, 20 nt, synthetic construct
  source 1..20: mol_type = other RNA
atcggataggcaacctctga

SEQ ID NO: 20174 - RNA, 20 nt, synthetic construct
  source 1..20: mol_type = other RNA
gacgccaaggcgtctgcaaa

SEQ ID NO: 20175 - RNA, 20 nt, synthetic construct
  source 1..20: mol_type = other RNA
tgaggataacctgtcgcggc

SEQ ID NO: 20176 - RNA, 20 nt, synthetic construct
  source 1..20: mol_type = other RNA
gaggataacctgtcgcggca

SEQ ID NO: 20177 - RNA, 20 nt, synthetic construct
  source 1..20: mol_type = other RNA
gcagggttgagtgagctatc

SEQ ID NO: 20178 - RNA, 20 nt, synthetic construct
  source 1..20: mol_type = other RNA
cagggttgagtgagctatca

SEQ ID NO: 20179 - RNA, 20 nt, synthetic construct
  source 1..20: mol_type = other RNA
caactccgcgtatagctccc

SEQ ID NO: 20180 - RNA, 20 nt, synthetic construct
  source 1..20: mol_type = other RNA
ttctcgcagatagtagcgaa

SEQ ID NO: 20181 - RNA, 20 nt, synthetic construct
  source 1..20: mol_type = other RNA
gttgagcaacacatgggtaa

SEQ ID NO: 20182 - RNA, 20 nt, synthetic construct
  source 1..20: mol_type = other RNA
gaaatcatccaccagtagcg

SEQ ID NO: 20183 - RNA, 20 nt, synthetic construct
  source 1..20: mol_type = other RNA
cagtagcgtggaggattggt

SEQ ID NO: 20184 - RNA, 20 nt, synthetic construct
  source 1..20: mol_type = other RNA
tagcgtggaggattggtagg

SEQ ID NO: 20185 - RNA, 20 nt, synthetic construct
  source 1..20: mol_type = other RNA
gtggcaatcacaagaagaga

SEQ ID NO: 20186 - RNA, 20 nt, synthetic construct
  source 1..20: mol_type = other RNA
ttccagagtctgccgtagta

SEQ ID NO: 20187 - RNA, 20 nt, synthetic construct
  source 1..20: mol_type = other RNA
gagtctgccgtagtagggac

SEQ ID NO: 20188 - RNA, 20 nt, synthetic construct
  source 1..20: mol_type = other RNA
tgccgtagtagggacaggcc

SEQ ID NO: 20189 - RNA, 20 nt, synthetic construct
  source 1..20: mol_type = other RNA
gtagggacaggcccggcacc

SEQ ID NO: 20190 - RNA, 20 nt, synthetic construct
  source 1..20: mol_type = other RNA
gcggcaggccatctgcagaa

SEQ ID NO: 20191 - RNA, 20 nt, synthetic construct
  source 1..20: mol_type = other RNA
cttccacaggagttatcacc

SEQ ID NO: 20192 - RNA, 20 nt, synthetic construct
  source 1..20: mol_type = other RNA
ttgcttatcagcggatcaga

SEQ ID NO: 20193 - RNA, 20 nt, synthetic construct
  source 1..20: mol_type = other RNA
ggaatcattcatctcataag

SEQ ID NO: 20194 - RNA, 20 nt, synthetic construct
  source 1..20: mol_type = other RNA
gaatcattcatctcataagt

SEQ ID NO: 20195 - RNA, 20 nt, synthetic construct
  source 1..20: mol_type = other RNA
aggttgtataagatccatca

SEQ ID NO: 20196 - RNA, 20 nt, synthetic construct
  source 1..20: mol_type = other RNA
agatccatcatggagcctag

SEQ ID NO: 20197 - RNA, 20 nt, synthetic construct
  source 1..20: mol_type = other RNA
aaactcctcttgaccgccgt

SEQ ID NO: 20198 - RNA, 20 nt, synthetic construct
  source 1..20: mol_type = other RNA
accgccgtgggaaatcatcc

SEQ ID NO: 20199 - RNA, 20 nt, synthetic construct
  source 1..20: mol_type = other RNA
ccgccgtgggaaatcatcca

SEQ ID NO: 20200 - RNA, 20 nt, synthetic construct
  source 1..20: mol_type = other RNA
gggaaatcatccagggtagt

SEQ ID NO: 20201 - RNA, 20 nt, synthetic construct
  source 1..20: mol_type = other RNA
gtatgccgtagtgatcaccg

SEQ ID NO: 20202 - RNA, 20 nt, synthetic construct
  source 1..20: mol_type = other RNA
cgtggactccagatggttat

SEQ ID NO: 20203 - RNA, 20 nt, synthetic construct
  source 1..20: mol_type = other RNA
agttcttaccaaactcgacc

SEQ ID NO: 20204 - RNA, 20 nt, synthetic construct
  source 1..20: mol_type = other RNA
tcttaccaaactcgaccagg

SEQ ID NO: 20205 - RNA, 20 nt, synthetic construct
  source 1..20: mol_type = other RNA
gagccagcgcggattctcat

SEQ ID NO: 20206 - RNA, 20 nt, synthetic construct
  source 1..20: mol_type = other RNA
agaaatgattagatgcccgg

SEQ ID NO: 20207 - RNA, 20 nt, synthetic construct
  source 1..20: mol_type = other RNA
cgttgtagaaatgtcacata

SEQ ID NO: 20208 - RNA, 20 nt, synthetic construct
  source 1..20: mol_type = other RNA
accctgctataaatatcagc

SEQ ID NO: 20209 - RNA, 20 nt, synthetic construct
  source 1..20: mol_type = other RNA
taatgcggccgcaccattca

SEQ ID NO: 20210 - RNA, 20 nt, synthetic construct
  source 1..20: mol_type = other RNA
agacttgctgagctgttccc

SEQ ID NO: 20211 - RNA, 20 nt, synthetic construct
  source 1..20: mol_type = other RNA
acacagttctgatactgcgt

SEQ ID NO: 20212 - RNA, 20 nt, synthetic construct
  source 1..20: mol_type = other RNA
ctcacccagagtgttcctgt

SEQ ID NO: 20213 - RNA, 20 nt, synthetic construct
  source 1..20: mol_type = other RNA
ttcgtcggcaacaacaaaga

SEQ ID NO: 20214 - RNA, 20 nt, synthetic construct
  source 1..20: mol_type = other RNA
tataccagttccaacattcg

SEQ ID NO: 20215 - RNA, 20 nt, synthetic construct
  source 1..20: mol_type = other RNA
agatagactatcgcaggcgc

SEQ ID NO: 20216 - RNA, 20 nt, synthetic construct
  source 1..20: mol_type = other RNA
ttatgactattcaacccttg

SEQ ID NO: 20217 - RNA, 20 nt, synthetic construct
  source 1..20: mol_type = other RNA
gtaccagctgcaccagtcaa

SEQ ID NO: 20218 - RNA, 20 nt, synthetic construct
  source 1..20: mol_type = other RNA
aacggcctcctccttctcaa

SEQ ID NO: 20219 - RNA, 20 nt, synthetic construct
  source 1..20: mol_type = other RNA
attacaagctgtccctcctg

SEQ ID NO: 20220 - RNA, 20 nt, synthetic construct
  source 1..20: mol_type = other RNA
ggtcatcatggaacgcccgc

SEQ ID NO: 20221 - RNA, 20 nt, synthetic construct
  source 1..20: mol_type = other RNA
cgcgtcgccattatgatcta

SEQ ID NO: 20222 - RNA, 20 nt, synthetic construct
  source 1..20: mol_type = other RNA
gccattatgatctatggaat

SEQ ID NO: 20223 - RNA, 20 nt, synthetic construct
  source 1..20: mol_type = other RNA
tcgcccaccatgttcaatgc

SEQ ID NO: 20224 - RNA, 20 nt, synthetic construct
  source 1..20: mol_type = other RNA
tcaggcggcggcggtggaat

SEQ ID NO: 20225 - RNA, 20 nt, synthetic construct
  source 1..20: mol_type = other RNA
tcacaatgctacgcgaacca

SEQ ID NO: 20226 - RNA, 20 nt, synthetic construct
  source 1..20: mol_type = other RNA
caatgctacgcgaaccaggg

SEQ ID NO: 20227 - RNA, 20 nt, synthetic construct
  source 1..20: mol_type = other RNA
aaccagggaggcctacgccc

SEQ ID NO: 20228 - RNA, 20 nt, synthetic construct
  source 1..20: mol_type = other RNA
accagggaggcctacgccct

SEQ ID NO: 20229 - RNA, 20 nt, synthetic construct
  source 1..20: mol_type = other RNA
ccaatctcaagtacggtcta

SEQ ID NO: 20230 - RNA, 20 nt, synthetic construct
  source 1..20: mol_type = other RNA
caatctcaagtacggtctat

SEQ ID NO: 20231 - RNA, 20 nt, synthetic construct
  source 1..20: mol_type = other RNA
gaagaccaaatacataacag

SEQ ID NO: 20232 - RNA, 20 nt, synthetic construct
  source 1..20: mol_type = other RNA
caaatacataacagaggcga

SEQ ID NO: 20233 - RNA, 20 nt, synthetic construct
  source 1..20: mol_type = other RNA
ataacagaggcgacggcacc

SEQ ID NO: 20234 - RNA, 20 nt, synthetic construct
  source 1..20: mol_type = other RNA
aaggtacaccggtgttacga

SEQ ID NO: 20235 - RNA, 20 nt, synthetic construct
  source 1..20: mol_type = other RNA
caccggtgttacgacggcca

SEQ ID NO: 20236 - RNA, 20 nt, synthetic construct
  source 1..20: mol_type = other RNA
aatatgcgtcaccgacctat

SEQ ID NO: 20237 - RNA, 20 nt, synthetic construct
  source 1..20: mol_type = other RNA
cgtcaccgacctattggcat

SEQ ID NO: 20238 - RNA, 20 nt, synthetic construct
  source 1..20: mol_type = other RNA
gtcaccgacctattggcatc

SEQ ID NO: 20239 - RNA, 20 nt, synthetic construct
  source 1..20: mol_type = other RNA
tcaccgacctattggcatcg

SEQ ID NO: 20240 - RNA, 20 nt, synthetic construct
  source 1..20: mol_type = other RNA
atccatgcggccctatacta

SEQ ID NO: 20241 - RNA, 20 nt, synthetic construct
  source 1..20: mol_type = other RNA
tccatgcggccctatactac

SEQ ID NO: 20242 - RNA, 20 nt, synthetic construct
  source 1..20: mol_type = other RNA
ccatgcggccctatactacg

SEQ ID NO: 20243 - RNA, 20 nt, synthetic construct
  source 1..20: mol_type = other RNA
gtctactgcaacccgaccta

SEQ ID NO: 20244 - RNA, 20 nt, synthetic construct
  source 1..20: mol_type = other RNA
tctactgcaacccgacctat

SEQ ID NO: 20245 - RNA, 20 nt, synthetic construct
  source 1..20: mol_type = other RNA
cccgacctatgggttcgctg

SEQ ID NO: 20246 - RNA, 20 nt, synthetic construct
  source 1..20: mol_type = other RNA
acgcgtggcacagacgacgc

SEQ ID NO: 20247 - RNA, 20 nt, synthetic construct
  source 1..20: mol_type = other RNA
cgacgcagggtgtgttaacg

SEQ ID NO: 20248 - RNA, 20 nt, synthetic construct
  source 1..20: mol_type = other RNA
aagctggtggcaactacggc

SEQ ID NO: 20249 - RNA, 20 nt, synthetic construct
  source 1..20: mol_type = other RNA
ctacggctggcggccatgca

SEQ ID NO: 20250 - RNA, 20 nt, synthetic construct
  source 1..20: mol_type = other RNA
gccatgcagggagttcgaaa

SEQ ID NO: 20251 - RNA, 20 nt, synthetic construct
  source 1..20: mol_type = other RNA
agttcgaaatggatatctca

SEQ ID NO: 20252 - RNA, 20 nt, synthetic construct
  source 1..20: mol_type = other RNA
tatacacgtagaacgttaag

SEQ ID NO: 20253 - RNA, 20 nt, synthetic construct
  source 1..20: mol_type = other RNA
atacacgtagaacgttaagc

SEQ ID NO: 20254 - RNA, 20 nt, synthetic construct
  source 1..20: mol_type = other RNA
tacacgtagaacgttaagcg

SEQ ID NO: 20255 - RNA, 20 nt, synthetic construct
  source 1..20: mol_type = other RNA
taccggccgagatccgtgat

SEQ ID NO: 20256 - RNA, 20 nt, synthetic construct
  source 1..20: mol_type = other RNA
ttatgaacctgaactaagcc

SEQ ID NO: 20257 - RNA, 20 nt, synthetic construct
  source 1..20: mol_type = other RNA
gtacttacggtgctcgtcct

SEQ ID NO: 20258 - RNA, 20 nt, synthetic construct
  source 1..20: mol_type = other RNA
ttacggtgctcgtcctaggc

SEQ ID NO: 20259 - RNA, 20 nt, synthetic construct
  source 1..20: mol_type = other RNA
ctctgagaaagcgtgtaatg

SEQ ID NO: 20260 - RNA, 20 nt, synthetic construct
  source 1..20: mol_type = other RNA
agcgtgtaatgcggactgcg

SEQ ID NO: 20261 - RNA, 20 nt, synthetic construct
  source 1..20: mol_type = other RNA
tgtagtaattacccttgtta

SEQ ID NO: 20262 - RNA, 20 nt, synthetic construct
  source 1..20: mol_type = other RNA
gttcattggtcaatatatta

SEQ ID NO: 20263 - RNA, 20 nt, synthetic construct
  source 1..20: mol_type = other RNA
acagcataatggcgtacata

SEQ ID NO: 20264 - RNA, 20 nt, synthetic construct
  source 1..20: mol_type = other RNA
atgatgctctgcatgttgca

SEQ ID NO: 20265 - RNA, 20 nt, synthetic construct
  source 1..20: mol_type = other RNA
catacgcaaataggtcttgc

SEQ ID NO: 20266 - RNA, 20 nt, synthetic construct
  source 1..20: mol_type = other RNA
cagtataaacaccttagcgc

SEQ ID NO: 20267 - RNA, 20 nt, synthetic construct
  source 1..20: mol_type = other RNA
aaacaccttagcgccggtgt

SEQ ID NO: 20268 - RNA, 20 nt, synthetic construct
  source 1..20: mol_type = other RNA
tagcgccggtgtcggcgacc

SEQ ID NO: 20269 - RNA, 20 nt, synthetic construct
  source 1..20: mol_type = other RNA
tcgagccatagatggtagta

SEQ ID NO: 20270 - RNA, 20 nt, synthetic construct
  source 1..20: mol_type = other RNA
cacgcacgcggcccaacatt

SEQ ID NO: 20271 - RNA, 20 nt, synthetic construct
  source 1..20: mol_type = other RNA
cgaaacacccgccgaaatcg

SEQ ID NO: 20272 - RNA, 20 nt, synthetic construct
  source 1..20: mol_type = other RNA
gaaacacccgccgaaatcgt

SEQ ID NO: 20273 - RNA, 20 nt, synthetic construct
  source 1..20: mol_type = other RNA
aaatcgtgggcgtatagata

SEQ ID NO: 20274 - RNA, 20 nt, synthetic construct
  source 1..20: mol_type = other RNA
gataaatgattgcaacagcc

SEQ ID NO: 20275 - RNA, 20 nt, synthetic construct
  source 1..20: mol_type = other RNA
tgaaataatacgtgtcatgc

SEQ ID NO: 20276 - RNA, 20 nt, synthetic construct
  source 1..20: mol_type = other RNA
aataagtaggtccacaggct

SEQ ID NO: 20277 - RNA, 20 nt, synthetic construct
  source 1..20: mol_type = other RNA
gtccacaggctcggctgtgg

SEQ ID NO: 20278 - RNA, 20 nt, synthetic construct
  source 1..20: mol_type = other RNA
gctcggctgtggaggttagc

SEQ ID NO: 20279 - RNA, 20 nt, synthetic construct
  source 1..20: mol_type = other RNA
tcgaaatgtcacaaaccgta

SEQ ID NO: 20280 - RNA, 20 nt, synthetic construct
  source 1..20: mol_type = other RNA
tggatagtatcgcaggaact

SEQ ID NO: 20281 - RNA, 20 nt, synthetic construct
  source 1..20: mol_type = other RNA
cgcgttagattgatgttata

SEQ ID NO: 20282 - RNA, 20 nt, synthetic construct
  source 1..20: mol_type = other RNA
tatcctctacggcttctcct

SEQ ID NO: 20283 - RNA, 20 nt, synthetic construct
  source 1..20: mol_type = other RNA
tatagaacgttacgatacca

SEQ ID NO: 20284 - RNA, 20 nt, synthetic construct
  source 1..20: mol_type = other RNA
caaccttatgaccgtcatga

SEQ ID NO: 20285 - RNA, 20 nt, synthetic construct
  source 1..20: mol_type = other RNA
gataaatggcactccacttc

SEQ ID NO: 20286 - RNA, 20 nt, synthetic construct
  source 1..20: mol_type = other RNA
caaacgagtcctcccgcctc

SEQ ID NO: 20287 - RNA, 20 nt, synthetic construct
  source 1..20: mol_type = other RNA
tgttcttcacgcgtagcgaa

SEQ ID NO: 20288 - RNA, 20 nt, synthetic construct
  source 1..20: mol_type = other RNA
gttcttcacgcgtagcgaat

SEQ ID NO: 20289 - RNA, 20 nt, synthetic construct
  source 1..20: mol_type = other RNA
accagaaattcaggccatat

SEQ ID NO: 20290 - RNA, 20 nt, synthetic construct
  source 1..20: mol_type = other RNA
gatcgaaagattgcatgccg

SEQ ID NO: 20291 - RNA, 20 nt, synthetic construct
  source 1..20: mol_type = other RNA
atcgaaagattgcatgccga

SEQ ID NO: 20292 - RNA, 20 nt, synthetic construct
  source 1..20: mol_type = other RNA
tccaaatctggttcctccag

SEQ ID NO: 20293 - RNA, 20 nt, synthetic construct
  source 1..20: mol_type = other RNA
tggaacaattagccttgtgc

SEQ ID NO: 20294 - RNA, 20 nt, synthetic construct
  source 1..20: mol_type = other RNA
ggaacaattagccttgtgct

SEQ ID NO: 20295 - RNA, 20 nt, synthetic construct
  source 1..20: mol_type = other RNA
agcacacagttatctgacgt

SEQ ID NO: 20296 - RNA, 20 nt, synthetic construct
  source 1..20: mol_type = other RNA
gacaagacgcttatccttgc

SEQ ID NO: 20297 - RNA, 20 nt, synthetic construct
  source 1..20: mol_type = other RNA
aagacgcttatccttgcggg

SEQ ID NO: 20298 - RNA, 20 nt, synthetic construct
  source 1..20: mol_type = other RNA
tactctgctaaaccaggcct

SEQ ID NO: 20299 - RNA, 20 nt, synthetic construct
  source 1..20: mol_type = other RNA
atgtataagctagatcccat

SEQ ID NO: 20300 - RNA, 20 nt, synthetic construct
  source 1..20: mol_type = other RNA
tgtataagctagatcccatt

SEQ ID NO: 20301 - RNA, 20 nt, synthetic construct
  source 1..20: mol_type = other RNA
gcaaagattgttgaagaagg

SEQ ID NO: 20302 - RNA, 20 nt, synthetic construct
  source 1..20: mol_type = other RNA
cggaatagctgaagcctcag

SEQ ID NO: 20303 - RNA, 20 nt, synthetic construct
  source 1..20: mol_type = other RNA
tcaccaagattcccaaccat

SEQ ID NO: 20304 - RNA, 20 nt, synthetic construct
  source 1..20: mol_type = other RNA
tccgcgaagattggaaatag

SEQ ID NO: 20305 - RNA, 20 nt, synthetic construct
  source 1..20: mol_type = other RNA
ccgcgaagattggaaatagc

SEQ ID NO: 20306 - RNA, 20 nt, synthetic construct
  source 1..20: mol_type = other RNA
cgaagattggaaatagcggg

SEQ ID NO: 20307 - RNA, 20 nt, synthetic construct
  source 1..20: mol_type = other RNA
gaagattggaaatagcgggc

SEQ ID NO: 20308 - RNA, 20 nt, synthetic construct
  source 1..20: mol_type = other RNA
ggaaatagcgggcgggaaga

SEQ ID NO: 20309 - RNA, 20 nt, synthetic construct
  source 1..20: mol_type = other RNA
aatagcgggcgggaagaagg

SEQ ID NO: 20310 - RNA, 20 nt, synthetic construct
  source 1..20: mol_type = other RNA
acccgtcagcgaatcgttgt

SEQ ID NO: 20311 - RNA, 20 nt, synthetic construct
  source 1..20: mol_type = other RNA
cgtcagcgaatcgttgttgg

SEQ ID NO: 20312 - RNA, 20 nt, synthetic construct
  source 1..20: mol_type = other RNA
tccgctcttgcctacaaatc

SEQ ID NO: 20313 - RNA, 20 nt, synthetic construct
  source 1..20: mol_type = other RNA
tgcctacaaatccggaatta

SEQ ID NO: 20314 - RNA, 20 nt, synthetic construct
  source 1..20: mol_type = other RNA
atagtagatatgtacaacac

SEQ ID NO: 20315 - RNA, 20 nt, synthetic construct
  source 1..20: mol_type = other RNA
accctaacgcgctcataaag

SEQ ID NO: 20316 - RNA, 20 nt, synthetic construct
  source 1..20: mol_type = other RNA
ccctaacgcgctcataaagt

SEQ ID NO: 20317 - RNA, 20 nt, synthetic construct
  source 1..20: mol_type = other RNA
cacggatgtaatattaacat

SEQ ID NO: 20318 - RNA, 20 nt, synthetic construct
  source 1..20: mol_type = other RNA
ttcgtgttgaaatacgatgg

SEQ ID NO: 20319 - RNA, 20 nt, synthetic construct
  source 1..20: mol_type = other RNA
gctatctaccatgccgatat

SEQ ID NO: 20320 - RNA, 20 nt, synthetic construct
  source 1..20: mol_type = other RNA
ctaccatgccgatatcggcc

SEQ ID NO: 20321 - RNA, 20 nt, synthetic construct
  source 1..20: mol_type = other RNA
gggatgactcgcgttataga

SEQ ID NO: 20322 - RNA, 20 nt, synthetic construct
  source 1..20: mol_type = other RNA
tgactcgcgttatagatggc

SEQ ID NO: 20323 - RNA, 20 nt, synthetic construct
  source 1..20: mol_type = other RNA
cgtccaacggctggcctgtg

SEQ ID NO: 20324 - RNA, 20 nt, synthetic construct
  source 1..20: mol_type = other RNA
gtccaacggctggcctgtga

SEQ ID NO: 20325 - RNA, 20 nt, synthetic construct
  source 1..20: mol_type = other RNA
ctggcctgtgagggcatccg

SEQ ID NO: 20326 - RNA, 20 nt, synthetic construct
  source 1..20: mol_type = other RNA
cgtgggcccatagcttgcaa

SEQ ID NO: 20327 - RNA, 20 nt, synthetic construct
  source 1..20: mol_type = other RNA
catagcttgcaacggcgtat

SEQ ID NO: 20328 - RNA, 20 nt, synthetic construct
  source 1..20: mol_type = other RNA
tgcaggcgctggtgataggt

SEQ ID NO: 20329 - RNA, 20 nt, synthetic construct
  source 1..20: mol_type = other RNA
ataggtcggtcctatgaaga

SEQ ID NO: 20330 - RNA, 20 nt, synthetic construct
  source 1..20: mol_type = other RNA
ggccgcatcaaagtactcgc

SEQ ID NO: 20331 - RNA, 20 nt, synthetic construct
  source 1..20: mol_type = other RNA
catcaaagtactcgccggtc

SEQ ID NO: 20332 - RNA, 20 nt, synthetic construct
  source 1..20: mol_type = other RNA
ttgaccgttggtcattcggg

SEQ ID NO: 20333 - RNA, 20 nt, synthetic construct
  source 1..20: mol_type = other RNA
tgaccgttggtcattcggga

SEQ ID NO: 20334 - RNA, 20 nt, synthetic construct
  source 1..20: mol_type = other RNA
tcattcgggagggatgtgag

SEQ ID NO: 20335 - RNA, 20 nt, synthetic construct
  source 1..20: mol_type = other RNA
ttcgggagggatgtgagtgg

SEQ ID NO: 20336 - RNA, 20 nt, synthetic construct
  source 1..20: mol_type = other RNA
gaggccaaagatctcgtcat

SEQ ID NO: 20337 - RNA, 20 nt, synthetic construct
  source 1..20: mol_type = other RNA
aggccaaagatctcgtcatt

SEQ ID NO: 20338 - RNA, 20 nt, synthetic construct
  source 1..20: mol_type = other RNA
agatctcgtcattgggccca

SEQ ID NO: 20339 - RNA, 20 nt, synthetic construct
  source 1..20: mol_type = other RNA
gatctcgtcattgggcccat

SEQ ID NO: 20340 - RNA, 20 nt, synthetic construct
  source 1..20: mol_type = other RNA
atctcgtcattgggcccatg

SEQ ID NO: 20341 - RNA, 20 nt, synthetic construct
  source 1..20: mol_type = other RNA
acgcatcacagcatccacga

SEQ ID NO: 20342 - RNA, 20 nt, synthetic construct
  source 1..20: mol_type = other RNA
atcacagcatccacgacggc

SEQ ID NO: 20343 - RNA, 20 nt, synthetic construct
  source 1..20: mol_type = other RNA
cgaagccgtacatgacagac

SEQ ID NO: 20344 - RNA, 20 nt, synthetic construct
  source 1..20: mol_type = other RNA
ttcttctcggtagaaggtgc

SEQ ID NO: 20345 - RNA, 20 nt, synthetic construct
  source 1..20: mol_type = other RNA
gtagccgccgtagatcatat

SEQ ID NO: 20346 - RNA, 20 nt, synthetic construct
  source 1..20: mol_type = other RNA
gtagatcatataggccacaa

SEQ ID NO: 20347 - RNA, 20 nt, synthetic construct
  source 1..20: mol_type = other RNA
acaatggtattaagcccgtt

SEQ ID NO: 20348 - RNA, 20 nt, synthetic construct
  source 1..20: mol_type = other RNA
cataagtaacacgagcaggt

SEQ ID NO: 20349 - RNA, 20 nt, synthetic construct
  source 1..20: mol_type = other RNA
ataagtaacacgagcaggtt

SEQ ID NO: 20350 - RNA, 20 nt, synthetic construct
  source 1..20: mol_type = other RNA
gcgtagctcgatgatagaga

SEQ ID NO: 20351 - RNA, 20 nt, synthetic construct
  source 1..20: mol_type = other RNA
ggcctctgcggccttgtaac

SEQ ID NO: 20352 - RNA, 20 nt, synthetic construct
  source 1..20: mol_type = other RNA
ttattatctacaatgagcag

SEQ ID NO: 20353 - RNA, 20 nt, synthetic construct
  source 1..20: mol_type = other RNA
taccatgctatcccagtaga

SEQ ID NO: 20354 - RNA, 20 nt, synthetic construct
  source 1..20: mol_type = other RNA
tcccagtagatggtggtatg

SEQ ID NO: 20355 - RNA, 20 nt, synthetic construct
  source 1..20: mol_type = other RNA
gatgcacaatcttgccctca

SEQ ID NO: 20356 - RNA, 20 nt, synthetic construct
  source 1..20: mol_type = other RNA
ataccgctgagcaagctcaa

SEQ ID NO: 20357 - RNA, 20 nt, synthetic construct
  source 1..20: mol_type = other RNA
cgttgataaatacgcgcgct

SEQ ID NO: 20358 - RNA, 20 nt, synthetic construct
  source 1..20: mol_type = other RNA
tcggctaactgttgaatggc

SEQ ID NO: 20359 - RNA, 20 nt, synthetic construct
  source 1..20: mol_type = other RNA
gaatggccggatctgataga

SEQ ID NO: 20360 - RNA, 20 nt, synthetic construct
  source 1..20: mol_type = other RNA
taacgaaagtacttctccag

SEQ ID NO: 20361 - RNA, 20 nt, synthetic construct
  source 1..20: mol_type = other RNA
ttctccagcggtacagacat

SEQ ID NO: 20362 - RNA, 20 nt, synthetic construct
  source 1..20: mol_type = other RNA
ggtacagacattggcggtaa

SEQ ID NO: 20363 - RNA, 20 nt, synthetic construct
  source 1..20: mol_type = other RNA
ttcaccagtatcggctgact

SEQ ID NO: 20364 - RNA, 20 nt, synthetic construct
  source 1..20: mol_type = other RNA
tgggctacgcagatgtatcc

SEQ ID NO: 20365 - RNA, 20 nt, synthetic construct
  source 1..20: mol_type = other RNA
ttccatactgcgattgagat

SEQ ID NO: 20366 - RNA, 20 nt, synthetic construct
  source 1..20: mol_type = other RNA
catactgcgattgagatcgg

SEQ ID NO: 20367 - RNA, 20 nt, synthetic construct
  source 1..20: mol_type = other RNA
actgcgattgagatcggagg

SEQ ID NO: 20368 - RNA, 20 nt, synthetic construct
  source 1..20: mol_type = other RNA
ccctgagccgtgcacccgct

SEQ ID NO: 20369 - RNA, 20 nt, synthetic construct
  source 1..20: mol_type = other RNA
agccgtgcacccgcttggtg

SEQ ID NO: 20370 - RNA, 20 nt, synthetic construct
  source 1..20: mol_type = other RNA
gcttggtgcggtagctatca

SEQ ID NO: 20371 - RNA, 20 nt, synthetic construct
  source 1..20: mol_type = other RNA
gcggtagctatcacggtccg

SEQ ID NO: 20372 - RNA, 20 nt, synthetic construct
  source 1..20: mol_type = other RNA
cggtagctatcacggtccgt

SEQ ID NO: 20373 - RNA, 20 nt, synthetic construct
  source 1..20: mol_type = other RNA
tagctatcacggtccgtggg

SEQ ID NO: 20374 - RNA, 20 nt, synthetic construct
  source 1..20: mol_type = other RNA
gtacacgtgtatctgcggtt

SEQ ID NO: 20375 - RNA, 20 nt, synthetic construct
  source 1..20: mol_type = other RNA
cggttcggctcgtgttggac

SEQ ID NO: 20376 - RNA, 20 nt, synthetic construct
  source 1..20: mol_type = other RNA
tgttggaccggttgaaatat

SEQ ID NO: 20377 - RNA, 20 nt, synthetic construct
  source 1..20: mol_type = other RNA
gttggaccggttgaaatatg

SEQ ID NO: 20378 - RNA, 20 nt, synthetic construct
  source 1..20: mol_type = other RNA
tctatcatgaaggtattcac

SEQ ID NO: 20379 - RNA, 20 nt, synthetic construct
  source 1..20: mol_type = other RNA
tattcccttgttgcatggta

SEQ ID NO: 20380 - RNA, 20 nt, synthetic construct
  source 1..20: mol_type = other RNA
tcgggctataaagtagccgc

SEQ ID NO: 20381 - RNA, 20 nt, synthetic construct
  source 1..20: mol_type = other RNA
cgggctataaagtagccgcc

SEQ ID NO: 20382 - RNA, 20 nt, synthetic construct
  source 1..20: mol_type = other RNA
aagtagccgccgggttcatt

SEQ ID NO: 20383 - RNA, 20 nt, synthetic construct
  source 1..20: mol_type = other RNA
agtagccgccgggttcatta

SEQ ID NO: 20384 - RNA, 20 nt, synthetic construct
  source 1..20: mol_type = other RNA
acctcggcggctagattaac

SEQ ID NO: 20385 - RNA, 20 nt, synthetic construct
  source 1..20: mol_type = other RNA
cctcggcggctagattaaca

SEQ ID NO: 20386 - RNA, 20 nt, synthetic construct
  source 1..20: mol_type = other RNA
tagattaacagggcccgaat

SEQ ID NO: 20387 - RNA, 20 nt, synthetic construct
  source 1..20: mol_type = other RNA
taacagggcccgaataggaa

SEQ ID NO: 20388 - RNA, 20 nt, synthetic construct
  source 1..20: mol_type = other RNA
tgtaagctcctcattatcca

SEQ ID NO: 20389 - RNA, 20 nt, synthetic construct
  source 1..20: mol_type = other RNA
tatcacggcaacggaaccag

SEQ ID NO: 20390 - RNA, 20 nt, synthetic construct
  source 1..20: mol_type = other RNA
caacactccaagtccgtcat

SEQ ID NO: 20391 - RNA, 20 nt, synthetic construct
  source 1..20: mol_type = other RNA
acactccaagtccgtcatag

SEQ ID NO: 20392 - RNA, 20 nt, synthetic construct
  source 1..20: mol_type = other RNA
atcgtattgagtcttatcct

SEQ ID NO: 20393 - RNA, 20 nt, synthetic construct
  source 1..20: mol_type = other RNA
gtattgagtcttatcctagg

SEQ ID NO: 20394 - RNA, 20 nt, synthetic construct
  source 1..20: mol_type = other RNA
ttgagtcttatcctaggtgg

SEQ ID NO: 20395 - RNA, 20 nt, synthetic construct
  source 1..20: mol_type = other RNA
agtcttatcctaggtggcgg

SEQ ID NO: 20396 - RNA, 20 nt, synthetic construct
  source 1..20: mol_type = other RNA
tattcttcttaatgaggtga

SEQ ID NO: 20397 - RNA, 20 nt, synthetic construct
  source 1..20: mol_type = other RNA
ggtagtattgatatgttcaa

SEQ ID NO: 20398 - RNA, 20 nt, synthetic construct
  source 1..20: mol_type = other RNA
gcaattgtgagcttccagga

SEQ ID NO: 20399 - RNA, 20 nt, synthetic construct
  source 1..20: mol_type = other RNA
cagttcggaaacagatgccc

SEQ ID NO: 20400 - RNA, 20 nt, synthetic construct
  source 1..20: mol_type = other RNA
gatgccctggaagaccacta

SEQ ID NO: 20401 - RNA, 20 nt, synthetic construct
  source 1..20: mol_type = other RNA
atccatctatataccgctga

SEQ ID NO: 20402 - RNA, 20 nt, synthetic construct
  source 1..20: mol_type = other RNA
catctatataccgctgacgg

SEQ ID NO: 20403 - RNA, 20 nt, synthetic construct
  source 1..20: mol_type = other RNA
ctgacggaggtattaatgta

SEQ ID NO: 20404 - RNA, 20 nt, synthetic construct
  source 1..20: mol_type = other RNA
ttgttgagccttagcaaagg

SEQ ID NO: 20405 - RNA, 20 nt, synthetic construct
  source 1..20: mol_type = other RNA
ttaccaaacctacctcctct

SEQ ID NO: 20406 - RNA, 20 nt, synthetic construct
  source 1..20: mol_type = other RNA
aggaatgtggcatggagatc

SEQ ID NO: 20407 - RNA, 20 nt, synthetic construct
  source 1..20: mol_type = other RNA
gataacttcgccaccgcact

SEQ ID NO: 20408 - RNA, 20 nt, synthetic construct
  source 1..20: mol_type = other RNA
tactgtcctaatgattgggt

SEQ ID NO: 20409 - RNA, 20 nt, synthetic construct
  source 1..20: mol_type = other RNA
aacaatacggtaatattacg

SEQ ID NO: 20410 - RNA, 20 nt, synthetic construct
  source 1..20: mol_type = other RNA
acaattaatgatacatatgg

SEQ ID NO: 20411 - RNA, 20 nt, synthetic construct
  source 1..20: mol_type = other RNA
tactgctatgacgcatctta

SEQ ID NO: 20412 - RNA, 20 nt, synthetic construct
  source 1..20: mol_type = other RNA
tacttgttccgtagctcatt

SEQ ID NO: 20413 - RNA, 20 nt, synthetic construct
  source 1..20: mol_type = other RNA
atgcttataagcattagcaa

SEQ ID NO: 20414 - RNA, 20 nt, synthetic construct
  source 1..20: mol_type = other RNA
aaatcagcccgtagaatgct

SEQ ID NO: 20415 - RNA, 20 nt, synthetic construct
  source 1..20: mol_type = other RNA
tcagatacatcctcacccat

SEQ ID NO: 20416 - RNA, 20 nt, synthetic construct
  source 1..20: mol_type = other RNA
tcaacatcctcgatgctaaa

SEQ ID NO: 20417 - RNA, 20 nt, synthetic construct
  source 1..20: mol_type = other RNA
gtaggccgagatgtcatcca

SEQ ID NO: 20418 - RNA, 20 nt, synthetic construct
  source 1..20: mol_type = other RNA
tatagagtaaagcaaggcgc

SEQ ID NO: 20419 - RNA, 20 nt, synthetic construct
  source 1..20: mol_type = other RNA
tggcaggatctgttacccgt

SEQ ID NO: 20420 - RNA, 20 nt, synthetic construct
  source 1..20: mol_type = other RNA
gagtcgaccgccatgagcct

SEQ ID NO: 20421 - RNA, 20 nt, synthetic construct
  source 1..20: mol_type = other RNA
gagccttggatcatccattg

SEQ ID NO: 20422 - RNA, 20 nt, synthetic construct
  source 1..20: mol_type = other RNA
cttggatcatccattgaggt

SEQ ID NO: 20423 - RNA, 20 nt, synthetic construct
  source 1..20: mol_type = other RNA
tcatccattgaggtaggtgg

SEQ ID NO: 20424 - RNA, 20 nt, synthetic construct
  source 1..20: mol_type = other RNA
tcgaaggtccatggctcctg

SEQ ID NO: 20425 - RNA, 20 nt, synthetic construct
  source 1..20: mol_type = other RNA
ccacctcatgttgtagcacg

SEQ ID NO: 20426 - RNA, 20 nt, synthetic construct
  source 1..20: mol_type = other RNA
gtagatcggcaagcgcataa

SEQ ID NO: 20427 - RNA, 20 nt, synthetic construct
  source 1..20: mol_type = other RNA
gcgtgttacttcaatctcgg

SEQ ID NO: 20428 - RNA, 20 nt, synthetic construct
  source 1..20: mol_type = other RNA
gacggccttgtaaacgtaaa

SEQ ID NO: 20429 - RNA, 20 nt, synthetic construct
  source 1..20: mol_type = other RNA
acgtaaatggtccacttatg

SEQ ID NO: 20430 - RNA, 20 nt, synthetic construct
  source 1..20: mol_type = other RNA
actcaaacagccgagtccgt

SEQ ID NO: 20431 - RNA, 20 nt, synthetic construct
  source 1..20: mol_type = other RNA
tggtcggctcttcctgtgtt

SEQ ID NO: 20432 - RNA, 20 nt, synthetic construct
  source 1..20: mol_type = other RNA
gaaataattcataggctcta

SEQ ID NO: 20433 - RNA, 20 nt, synthetic construct
  source 1..20: mol_type = other RNA
ttgcgataatagctcggccg

SEQ ID NO: 20434 - RNA, 20 nt, synthetic construct
  source 1..20: mol_type = other RNA
aaactcatattcagcctcct

SEQ ID NO: 20435 - RNA, 20 nt, synthetic construct
  source 1..20: mol_type = other RNA
aactcatattcagcctcctt

SEQ ID NO: 20436 - RNA, 20 nt, synthetic construct
  source 1..20: mol_type = other RNA
tcagcctccttgggagtccg

SEQ ID NO: 20437 - RNA, 20 nt, synthetic construct
  source 1..20: mol_type = other RNA
tagggatgctgccgtcaata

SEQ ID NO: 20438 - RNA, 20 nt, synthetic construct
  source 1..20: mol_type = other RNA
gccgtcaatacgggccacag

SEQ ID NO: 20439 - RNA, 20 nt, synthetic construct
  source 1..20: mol_type = other RNA
agtggcagcataatcataca

SEQ ID NO: 20440 - RNA, 20 nt, synthetic construct
  source 1..20: mol_type = other RNA
gtggcagcataatcatacat

SEQ ID NO: 20441 - RNA, 20 nt, synthetic construct
  source 1..20: mol_type = other RNA
acagcatacagctgcgttaa

SEQ ID NO: 20442 - RNA, 20 nt, synthetic construct
  source 1..20: mol_type = other RNA
cgatgctatacacgagcggc

SEQ ID NO: 20443 - RNA, 20 nt, synthetic construct
  source 1..20: mol_type = other RNA
tccaaagtggataaacgtgc

SEQ ID NO: 20444 - RNA, 20 nt, synthetic construct
  source 1..20: mol_type = other RNA
gataaacgtgcaggccttca

SEQ ID NO: 20445 - RNA, 20 nt, synthetic construct
  source 1..20: mol_type = other RNA
cttggttcgcatggtgtcgt

SEQ ID NO: 20446 - RNA, 20 nt, synthetic construct
  source 1..20: mol_type = other RNA
gctgtataagcatgtccaca

SEQ ID NO: 20447 - RNA, 20 nt, synthetic construct
  source 1..20: mol_type = other RNA
tctatataggtcataaagca

SEQ ID NO: 20448 - RNA, 20 nt, synthetic construct
  source 1..20: mol_type = other RNA
acttataaagttcgatatac

SEQ ID NO: 20449 - RNA, 20 nt, synthetic construct
  source 1..20: mol_type = other RNA
cgatatactggtgcgtaaac

SEQ ID NO: 20450 - RNA, 20 nt, synthetic construct
  source 1..20: mol_type = other RNA
attggtcaaattggctcctg

SEQ ID NO: 20451 - RNA, 20 nt, synthetic construct
  source 1..20: mol_type = other RNA
tcctgaggcgacgtagccca

SEQ ID NO: 20452 - RNA, 20 nt, synthetic construct
  source 1..20: mol_type = other RNA
gccatacgcataaagcactg

SEQ ID NO: 20453 - RNA, 20 nt, synthetic construct
  source 1..20: mol_type = other RNA
catacgcataaagcactgcg

SEQ ID NO: 20454 - RNA, 20 nt, synthetic construct
  source 1..20: mol_type = other RNA
gggcttctgcgggaacggcc

SEQ ID NO: 20455 - RNA, 20 nt, synthetic construct
  source 1..20: mol_type = other RNA
tactagcagttgacgtatgt

SEQ ID NO: 20456 - RNA, 20 nt, synthetic construct
  source 1..20: mol_type = other RNA
ttgacgtatgtaggcctcca

SEQ ID NO: 20457 - RNA, 20 nt, synthetic construct
  source 1..20: mol_type = other RNA
tgacgtatgtaggcctccat

SEQ ID NO: 20458 - RNA, 20 nt, synthetic construct
  source 1..20: mol_type = other RNA
ttgactgctcggcgcgaaca

SEQ ID NO: 20459 - RNA, 20 nt, synthetic construct
  source 1..20: mol_type = other RNA
gcgataagatatctgtgcca

SEQ ID NO: 20460 - RNA, 20 nt, synthetic construct
  source 1..20: mol_type = other RNA
ataagatatctgtgccacgg

SEQ ID NO: 20461 - RNA, 20 nt, synthetic construct
  source 1..20: mol_type = other RNA
aacaaccatgtgcaacggac

SEQ ID NO: 20462 - RNA, 20 nt, synthetic construct
  source 1..20: mol_type = other RNA
tggtgcctagcaagtaccca

SEQ ID NO: 20463 - RNA, 20 nt, synthetic construct
  source 1..20: mol_type = other RNA
atgatgtgagtaactactgt

SEQ ID NO: 20464 - RNA, 20 nt, synthetic construct
  source 1..20: mol_type = other RNA
cccgattactgctatacgat

SEQ ID NO: 20465 - RNA, 20 nt, synthetic construct
  source 1..20: mol_type = other RNA
actgctatacgattggaatt

SEQ ID NO: 20466 - RNA, 20 nt, synthetic construct
  source 1..20: mol_type = other RNA
acggtatatccagaatacta

SEQ ID NO: 20467 - RNA, 20 nt, synthetic construct
  source 1..20: mol_type = other RNA
ccagaatactacggctatat

SEQ ID NO: 20468 - RNA, 20 nt, synthetic construct
  source 1..20: mol_type = other RNA
tacggctatataggcattcc

SEQ ID NO: 20469 - RNA, 20 nt, synthetic construct
  source 1..20: mol_type = other RNA
ttaaatacgggacgcatgtg

SEQ ID NO: 20470 - RNA, 20 nt, synthetic construct
  source 1..20: mol_type = other RNA
aagcgaaaggacatgtaacg

SEQ ID NO: 20471 - RNA, 20 nt, synthetic construct
  source 1..20: mol_type = other RNA
accctcactgctgcgctatt

SEQ ID NO: 20472 - RNA, 20 nt, synthetic construct
  source 1..20: mol_type = other RNA
ggctatcctatgcagcagtc

SEQ ID NO: 20473 - RNA, 20 nt, synthetic construct
  source 1..20: mol_type = other RNA
tatgcagcagtcaggttata

SEQ ID NO: 20474 - RNA, 20 nt, synthetic construct
  source 1..20: mol_type = other RNA
ttactggaaccgtgatagcg

SEQ ID NO: 20475 - RNA, 20 nt, synthetic construct
  source 1..20: mol_type = other RNA
aatcacacgatggcgaatac

SEQ ID NO: 20476 - RNA, 20 nt, synthetic construct
  source 1..20: mol_type = other RNA
ttggtaccaacccttcatag

SEQ ID NO: 20477 - RNA, 20 nt, synthetic construct
  source 1..20: mol_type = other RNA
agaggcttataatgccatag

SEQ ID NO: 20478 - RNA, 20 nt, synthetic construct
  source 1..20: mol_type = other RNA
ggcttataatgccatagagg

SEQ ID NO: 20479 - RNA, 20 nt, synthetic construct
  source 1..20: mol_type = other RNA
taatgccatagaggcggccc

SEQ ID NO: 20480 - RNA, 20 nt, synthetic construct
  source 1..20: mol_type = other RNA
cattatcctgaacctcattg

SEQ ID NO: 20481 - RNA, 20 nt, synthetic construct
  source 1..20: mol_type = other RNA
ttccgactatattattgtga

SEQ ID NO: 20482 - RNA, 20 nt, synthetic construct
  source 1..20: mol_type = other RNA
aagcccataaggacttacta

SEQ ID NO: 20483 - RNA, 20 nt, synthetic construct
  source 1..20: mol_type = other RNA
tgttccgacttagtcatcaa

SEQ ID NO: 20484 - RNA, 20 nt, synthetic construct
  source 1..20: mol_type = other RNA
gttccgacttagtcatcaat

SEQ ID NO: 20485 - RNA, 20 nt, synthetic construct
  source 1..20: mol_type = other RNA
atgattaccacagagtacgt

SEQ ID NO: 20486 - RNA, 20 nt, synthetic construct
  source 1..20: mol_type = other RNA
tacgtgttcaagcacataga

SEQ ID NO: 20487 - RNA, 20 nt, synthetic construct
  source 1..20: mol_type = other RNA
acgtgttcaagcacatagat

SEQ ID NO: 20488 - RNA, 20 nt, synthetic construct
  source 1..20: mol_type = other RNA
ttcaagcacatagatgggtt

SEQ ID NO: 20489 - RNA, 20 nt, synthetic construct
  source 1..20: mol_type = other RNA
attaagcttgagcggcagta

SEQ ID NO: 20490 - RNA, 20 nt, synthetic construct
  source 1..20: mol_type = other RNA
agaaatcttgacgcacgccg

SEQ ID NO: 20491 - RNA, 20 nt, synthetic construct
  source 1..20: mol_type = other RNA
gaaatcttgacgcacgccga

SEQ ID NO: 20492 - RNA, 20 nt, synthetic construct
  source 1..20: mol_type = other RNA
agctgcggcgaaagcgttca

SEQ ID NO: 20493 - RNA, 20 nt, synthetic construct
  source 1..20: mol_type = other RNA
gctgcggcgaaagcgttcaa

SEQ ID NO: 20494 - RNA, 20 nt, synthetic construct
  source 1..20: mol_type = other RNA
ctgcggcgaaagcgttcaag

SEQ ID NO: 20495 - RNA, 20 nt, synthetic construct
  source 1..20: mol_type = other RNA
tctagcaaggtgtaccacac

SEQ ID NO: 20496 - RNA, 20 nt, synthetic construct
  source 1..20: mol_type = other RNA
ctagcaaggtgtaccacacc

SEQ ID NO: 20497 - RNA, 20 nt, synthetic construct
  source 1..20: mol_type = other RNA
attatattggtgtgccgctg

SEQ ID NO: 20498 - RNA, 20 nt, synthetic construct
  source 1..20: mol_type = other RNA
ggcgggccagctctcaaatg

SEQ ID NO: 20499 - RNA, 20 nt, synthetic construct
  source 1..20: mol_type = other RNA
tcaaatgaggtgtgaatgta

SEQ ID NO: 20500 - RNA, 20 nt, synthetic construct
  source 1..20: mol_type = other RNA
ggctgtagcctaacagttca

SEQ ID NO: 20501 - RNA, 20 nt, synthetic construct
  source 1..20: mol_type = other RNA
aaacttagtgtcctgtagtt

SEQ ID NO: 20502 - RNA, 20 nt, synthetic construct
  source 1..20: mol_type = other RNA
atcgcgaactacatcgcaga

SEQ ID NO: 20503 - RNA, 20 nt, synthetic construct
  source 1..20: mol_type = other RNA
tgcccggataataattataa

SEQ ID NO: 20504 - RNA, 20 nt, synthetic construct
  source 1..20: mol_type = other RNA
taagggagtgttgaaacgtc

SEQ ID NO: 20505 - RNA, 20 nt, synthetic construct
  source 1..20: mol_type = other RNA
aagggagtgttgaaacgtct

SEQ ID NO: 20506 - RNA, 20 nt, synthetic construct
  source 1..20: mol_type = other RNA
actgttgtacgtcgttagcc

SEQ ID NO: 20507 - RNA, 20 nt, synthetic construct
  source 1..20: mol_type = other RNA
ctgttgtacgtcgttagcca

SEQ ID NO: 20508 - RNA, 20 nt, synthetic construct
  source 1..20: mol_type = other RNA
gattctatatgccgggctaa

SEQ ID NO: 20509 - RNA, 20 nt, synthetic construct
  source 1..20: mol_type = other RNA
acgcgcgttgttaatacaaa

SEQ ID NO: 20510 - RNA, 20 nt, synthetic construct
  source 1..20: mol_type = other RNA
tgtcgttcgtcttgaatata

SEQ ID NO: 20511 - RNA, 20 nt, synthetic construct
  source 1..20: mol_type = other RNA
gtcgttcgtcttgaatatag

SEQ ID NO: 20512 - RNA, 20 nt, synthetic construct
  source 1..20: mol_type = other RNA
tcgttcgtcttgaatatagg

SEQ ID NO: 20513 - RNA, 20 nt, synthetic construct
  source 1..20: mol_type = other RNA
agggctcacatatctcagtc

SEQ ID NO: 20514 - RNA, 20 nt, synthetic construct
  source 1..20: mol_type = other RNA
cacatatctcagtcaggtga

SEQ ID NO: 20515 - RNA, 20 nt, synthetic construct
  source 1..20: mol_type = other RNA
gtacgtcgctaacaccagcg

SEQ ID NO: 20516 - RNA, 20 nt, synthetic construct
  source 1..20: mol_type = other RNA
tacgtcgctaacaccagcgc

SEQ ID NO: 20517 - RNA, 20 nt, synthetic construct
  source 1..20: mol_type = other RNA
cgctaacaccagcgcgggat

SEQ ID NO: 20518 - RNA, 20 nt, synthetic construct
  source 1..20: mol_type = other RNA
caccagcgcgggataggctt

SEQ ID NO: 20519 - RNA, 20 nt, synthetic construct
  source 1..20: mol_type = other RNA
tggtaggagtaagatggttg

SEQ ID NO: 20520 - RNA, 20 nt, synthetic construct
  source 1..20: mol_type = other RNA
gtatgccgcaaagccgtgta

SEQ ID NO: 20521 - RNA, 20 nt, synthetic construct
  source 1..20: mol_type = other RNA
tatcgacttcacaggaacaa

SEQ ID NO: 20522 - RNA, 20 nt, synthetic construct
  source 1..20: mol_type = other RNA
atcgacttcacaggaacaac

SEQ ID NO: 20523 - RNA, 20 nt, synthetic construct
  source 1..20: mol_type = other RNA
tcacaggaacaacgggaatg

SEQ ID NO: 20524 - RNA, 20 nt, synthetic construct
  source 1..20: mol_type = other RNA
ctaggtgtagcccggcccgc

SEQ ID NO: 20525 - RNA, 20 nt, synthetic construct
  source 1..20: mol_type = other RNA
tagcccggcccgctggtaat

SEQ ID NO: 20526 - RNA, 20 nt, synthetic construct
  source 1..20: mol_type = other RNA
agcccggcccgctggtaatc

SEQ ID NO: 20527 - RNA, 20 nt, synthetic construct
  source 1..20: mol_type = other RNA
gcccggcccgctggtaatcg

SEQ ID NO: 20528 - RNA, 20 nt, synthetic construct
  source 1..20: mol_type = other RNA
aaagtccgtgcgcacccgca

SEQ ID NO: 20529 - RNA, 20 nt, synthetic construct
  source 1..20: mol_type = other RNA
gcacccgcatggtctgcaca

SEQ ID NO: 20530 - RNA, 20 nt, synthetic construct
  source 1..20: mol_type = other RNA
gttcgtaggcatcctcaacg

SEQ ID NO: 20531 - RNA, 20 nt, synthetic construct
  source 1..20: mol_type = other RNA
gtaggcatcctcaacgtggt

SEQ ID NO: 20532 - RNA, 20 nt, synthetic construct
  source 1..20: mol_type = other RNA
ggcatcctcaacgtggttgg

SEQ ID NO: 20533 - RNA, 20 nt, synthetic construct
  source 1..20: mol_type = other RNA
cgaagagtgcggtcagctga

SEQ ID NO: 20534 - RNA, 20 nt, synthetic construct
  source 1..20: mol_type = other RNA
agtgcggtcagctgaaggac

SEQ ID NO: 20535 - RNA, 20 nt, synthetic construct
  source 1..20: mol_type = other RNA
atattctcgtctaaagatcg

SEQ ID NO: 20536 - RNA, 20 nt, synthetic construct
  source 1..20: mol_type = other RNA
tattctcgtctaaagatcgt

SEQ ID NO: 20537 - RNA, 20 nt, synthetic construct
  source 1..20: mol_type = other RNA
ctcctatcaccagcgcgatt

SEQ ID NO: 20538 - RNA, 20 nt, synthetic construct
  source 1..20: mol_type = other RNA
aactgctcacagttataacc

SEQ ID NO: 20539 - RNA, 20 nt, synthetic construct
  source 1..20: mol_type = other RNA
attaaacattgcttgtacgg

SEQ ID NO: 20540 - RNA, 20 nt, synthetic construct
  source 1..20: mol_type = other RNA
gtacggtggcagacgccgcg

SEQ ID NO: 20541 - RNA, 20 nt, synthetic construct
  source 1..20: mol_type = other RNA
tacgcggatgagaagaacat

SEQ ID NO: 20542 - RNA, 20 nt, synthetic construct
  source 1..20: mol_type = other RNA
acatcggcgtcgatcttaac

SEQ ID NO: 20543 - RNA, 20 nt, synthetic construct
  source 1..20: mol_type = other RNA
tcggcgtcgatcttaacagg

SEQ ID NO: 20544 - RNA, 20 nt, synthetic construct
  source 1..20: mol_type = other RNA
atgcagcgcatgacgagcag

SEQ ID NO: 20545 - RNA, 20 nt, synthetic construct
  source 1..20: mol_type = other RNA
tgccaactgttgcgctctaa

SEQ ID NO: 20546 - RNA, 20 nt, synthetic construct
  source 1..20: mol_type = other RNA
gaccaaccttgtggcctcaa

SEQ ID NO: 20547 - RNA, 20 nt, synthetic construct
  source 1..20: mol_type = other RNA
ggaggtaatgcgctcgttat

SEQ ID NO: 20548 - RNA, 20 nt, synthetic construct
  source 1..20: mol_type = other RNA
gaggtaatgcgctcgttatc

SEQ ID NO: 20549 - RNA, 20 nt, synthetic construct
  source 1..20: mol_type = other RNA
ctgcacaaagccctcgcaga

SEQ ID NO: 20550 - RNA, 20 nt, synthetic construct
  source 1..20: mol_type = other RNA
acaaagccctcgcagatgga

SEQ ID NO: 20551 - RNA, 20 nt, synthetic construct
  source 1..20: mol_type = other RNA
cacgatctcgtccttgtcct

SEQ ID NO: 20552 - RNA, 20 nt, synthetic construct
  source 1..20: mol_type = other RNA
cacagagggcgtattgcgta

SEQ ID NO: 20553 - RNA, 20 nt, synthetic construct
  source 1..20: mol_type = other RNA
atggattctacgaataagcc

SEQ ID NO: 20554 - RNA, 20 nt, synthetic construct
  source 1..20: mol_type = other RNA
tcagcgcaaatatctcgccg

SEQ ID NO: 20555 - RNA, 20 nt, synthetic construct
  source 1..20: mol_type = other RNA
ttgagccttacgaatgaaca

SEQ ID NO: 20556 - RNA, 20 nt, synthetic construct
  source 1..20: mol_type = other RNA
atgaacaaggaagccttgta

SEQ ID NO: 20557 - RNA, 20 nt, synthetic construct
  source 1..20: mol_type = other RNA
tgtaaggcctgtctattgcg

SEQ ID NO: 20558 - RNA, 20 nt, synthetic construct
  source 1..20: mol_type = other RNA
ggcagacattgccgctgaga

SEQ ID NO: 20559 - RNA, 20 nt, synthetic construct
  source 1..20: mol_type = other RNA
tgctacatgatcccgaagct

SEQ ID NO: 20560 - RNA, 20 nt, synthetic construct
  source 1..20: mol_type = other RNA
gcttcctccagagtattatg

SEQ ID NO: 20561 - RNA, 20 nt, synthetic construct
  source 1..20: mol_type = other RNA
gagcaacgtcgtattcgcct

SEQ ID NO: 20562 - RNA, 20 nt, synthetic construct
  source 1..20: mol_type = other RNA
ccaatacatccgccaactat

SEQ ID NO: 20563 - RNA, 20 nt, synthetic construct
  source 1..20: mol_type = other RNA
caagcggtccattatgtatt

SEQ ID NO: 20564 - RNA, 20 nt, synthetic construct
  source 1..20: mol_type = other RNA
gtggtggacgtggactcaaa

SEQ ID NO: 20565 - RNA, 20 nt, synthetic construct
  source 1..20: mol_type = other RNA
actcaaacgggaagtacgtt

SEQ ID NO: 20566 - RNA, 20 nt, synthetic construct
  source 1..20: mol_type = other RNA
accgggccagccaatgaatc

SEQ ID NO: 20567 - RNA, 20 nt, synthetic construct
  source 1..20: mol_type = other RNA
gtggcgcaaagaggtaaacc

SEQ ID NO: 20568 - RNA, 20 nt, synthetic construct
  source 1..20: mol_type = other RNA
tctaatgcgacttgtggcca

SEQ ID NO: 20569 - RNA, 20 nt, synthetic construct
  source 1..20: mol_type = other RNA
cgacttgtggccatggtatt

SEQ ID NO: 20570 - RNA, 20 nt, synthetic construct
  source 1..20: mol_type = other RNA
gcgaggttctaaatacgtcg

SEQ ID NO: 20571 - RNA, 20 nt, synthetic construct
  source 1..20: mol_type = other RNA
tctaaatacgtcgcggctga

SEQ ID NO: 20572 - RNA, 20 nt, synthetic construct
  source 1..20: mol_type = other RNA
tacgtcgcggctgaaggaaa

SEQ ID NO: 20573 - RNA, 20 nt, synthetic construct
  source 1..20: mol_type = other RNA
taacttcatcattgacacga

SEQ ID NO: 20574 - RNA, 20 nt, synthetic construct
  source 1..20: mol_type = other RNA
atcattgacacgacggacca

SEQ ID NO: 20575 - RNA, 20 nt, synthetic construct
  source 1..20: mol_type = other RNA
acacgacggaccacggcaca

SEQ ID NO: 20576 - RNA, 20 nt, synthetic construct
  source 1..20: mol_type = other RNA
acggcacatggagaagactg

SEQ ID NO: 20577 - RNA, 20 nt, synthetic construct
  source 1..20: mol_type = other RNA
actgcggcattatcgttcaa

SEQ ID NO: 20578 - RNA, 20 nt, synthetic construct
  source 1..20: mol_type = other RNA
tcccaccattgagagcgaaa

SEQ ID NO: 20579 - RNA, 20 nt, synthetic construct
  source 1..20: mol_type = other RNA
caccattgagagcgaaacgg

SEQ ID NO: 20580 - RNA, 20 nt, synthetic construct
  source 1..20: mol_type = other RNA
agtcacaagatacgctacat

SEQ ID NO: 20581 - RNA, 20 nt, synthetic construct
  source 1..20: mol_type = other RNA
aagagtcgtggagtcgccct

SEQ ID NO: 20582 - RNA, 20 nt, synthetic construct
  source 1..20: mol_type = other RNA
aactgtgtacaacctatccg

SEQ ID NO: 20583 - RNA, 20 nt, synthetic construct
  source 1..20: mol_type = other RNA
tcgtgacggcctacgcggaa

SEQ ID NO: 20584 - RNA, 20 nt, synthetic construct
  source 1..20: mol_type = other RNA
tattgcccttgagctatccc

SEQ ID NO: 20585 - RNA, 20 nt, synthetic construct
  source 1..20: mol_type = other RNA
cagcccggcgaatcctacat

SEQ ID NO: 20586 - RNA, 20 nt, synthetic construct
  source 1..20: mol_type = other RNA
agcccggcgaatcctacatt

SEQ ID NO: 20587 - RNA, 20 nt, synthetic construct
  source 1..20: mol_type = other RNA
gcccggcgaatcctacattg

SEQ ID NO: 20588 - RNA, 20 nt, synthetic construct
  source 1..20: mol_type = other RNA
atgaacagttcgtgctccga

SEQ ID NO: 20589 - RNA, 20 nt, synthetic construct
  source 1..20: mol_type = other RNA
ccatgtctctacgaatagta

SEQ ID NO: 20590 - RNA, 20 nt, synthetic construct
  source 1..20: mol_type = other RNA
gtaagatgatgcgccgccat

SEQ ID NO: 20591 - RNA, 20 nt, synthetic construct
  source 1..20: mol_type = other RNA
atgctggacatcgtccatat

SEQ ID NO: 20592 - RNA, 20 nt, synthetic construct
  source 1..20: mol_type = other RNA
tcgaggacggacacaaagct

SEQ ID NO: 20593 - RNA, 20 nt, synthetic construct
  source 1..20: mol_type = other RNA
acgggagatagcataatcct

SEQ ID NO: 20594 - RNA, 20 nt, synthetic construct
  source 1..20: mol_type = other RNA
ctaggcgttacaatgcacga

SEQ ID NO: 20595 - RNA, 20 nt, synthetic construct
  source 1..20: mol_type = other RNA
tgtcgtagcagaaacaatta

SEQ ID NO: 20596 - RNA, 20 nt, synthetic construct
  source 1..20: mol_type = other RNA
attattgataaagtatacga

SEQ ID NO: 20597 - RNA, 20 nt, synthetic construct
  source 1..20: mol_type = other RNA
taaagtatacgatggcatgt

SEQ ID NO: 20598 - RNA, 20 nt, synthetic construct
  source 1..20: mol_type = other RNA
gatcatctgccaatagaaga

SEQ ID NO: 20599 - RNA, 20 nt, synthetic construct
  source 1..20: mol_type = other RNA
ccgcaacagacacgacggct

SEQ ID NO: 20600 - RNA, 20 nt, synthetic construct
  source 1..20: mol_type = other RNA
tgccacaatggctcgctcaa

SEQ ID NO: 20601 - RNA, 20 nt, synthetic construct
  source 1..20: mol_type = other RNA
ggctgatgccagcgcatccg

SEQ ID NO: 20602 - RNA, 20 nt, synthetic construct
  source 1..20: mol_type = other RNA
gctgatgccagcgcatccgt

SEQ ID NO: 20603 - RNA, 20 nt, synthetic construct
  source 1..20: mol_type = other RNA
ctgatgccagcgcatccgtg

SEQ ID NO: 20604 - RNA, 20 nt, synthetic construct
  source 1..20: mol_type = other RNA
tgatgccagcgcatccgtgg

SEQ ID NO: 20605 - RNA, 20 nt, synthetic construct
  source 1..20: mol_type = other RNA
gatgccagcgcatccgtggg

SEQ ID NO: 20606 - RNA, 20 nt, synthetic construct
  source 1..20: mol_type = other RNA
atgagccctcccgcccattc

SEQ ID NO: 20607 - RNA, 20 nt, synthetic construct
  source 1..20: mol_type = other RNA
tgagccctcccgcccattca

SEQ ID NO: 20608 - RNA, 20 nt, synthetic construct
  source 1..20: mol_type = other RNA
tcccgcccattcagggtagt

SEQ ID NO: 20609 - RNA, 20 nt, synthetic construct
  source 1..20: mol_type = other RNA
gcaatcgcctcactatcgat

SEQ ID NO: 20610 - RNA, 20 nt, synthetic construct
  source 1..20: mol_type = other RNA
ggtgttatacagcggccagt

SEQ ID NO: 20611 - RNA, 20 nt, synthetic construct
  source 1..20: mol_type = other RNA
atgggtatcaatggtggcgg

SEQ ID NO: 20612 - RNA, 20 nt, synthetic construct
  source 1..20: mol_type = other RNA
tgagcataaggtcgatgcct

SEQ ID NO: 20613 - RNA, 20 nt, synthetic construct
  source 1..20: mol_type = other RNA
gagcataaggtcgatgccta

SEQ ID NO: 20614 - RNA, 20 nt, synthetic construct
  source 1..20: mol_type = other RNA
cgatgcctagggctcgctca

SEQ ID NO: 20615 - RNA, 20 nt, synthetic construct
  source 1..20: mol_type = other RNA
ggcctcatctataatcataa

SEQ ID NO: 20616 - RNA, 20 nt, synthetic construct
  source 1..20: mol_type = other RNA
tataatcataaaggcatagc

SEQ ID NO: 20617 - RNA, 20 nt, synthetic construct
  source 1..20: mol_type = other RNA
ggttgaggcgccgatgtctt

SEQ ID NO: 20618 - RNA, 20 nt, synthetic construct
  source 1..20: mol_type = other RNA
tggcgagggtcactgcggtt

SEQ ID NO: 20619 - RNA, 20 nt, synthetic construct
  source 1..20: mol_type = other RNA
gtcactgcggttaggactct

SEQ ID NO: 20620 - RNA, 20 nt, synthetic construct
  source 1..20: mol_type = other RNA
ctgcggttaggactcttggc

SEQ ID NO: 20621 - RNA, 20 nt, synthetic construct
  source 1..20: mol_type = other RNA
tgcggttaggactcttggct

SEQ ID NO: 20622 - RNA, 20 nt, synthetic construct
  source 1..20: mol_type = other RNA
ttctgaacacgtgtacgggc

SEQ ID NO: 20623 - RNA, 20 nt, synthetic construct
  source 1..20: mol_type = other RNA
tctgaacacgtgtacgggca

SEQ ID NO: 20624 - RNA, 20 nt, synthetic construct
  source 1..20: mol_type = other RNA
cacgtgtacgggcagggccg

SEQ ID NO: 20625 - RNA, 20 nt, synthetic construct
  source 1..20: mol_type = other RNA
aatgagcacccggtctgcga

SEQ ID NO: 20626 - RNA, 20 nt, synthetic construct
  source 1..20: mol_type = other RNA
gagcacccggtctgcgaggg

SEQ ID NO: 20627 - RNA, 20 nt, synthetic construct
  source 1..20: mol_type = other RNA
gtctgcgagggaggttggaa

SEQ ID NO: 20628 - RNA, 20 nt, synthetic construct
  source 1..20: mol_type = other RNA
acatcattcttgtgctcagc

SEQ ID NO: 20629 - RNA, 20 nt, synthetic construct
  source 1..20: mol_type = other RNA
tgaccaggctccaataaagt

SEQ ID NO: 20630 - RNA, 20 nt, synthetic construct
  source 1..20: mol_type = other RNA
tacgttgttatggaacgcga

SEQ ID NO: 20631 - RNA, 20 nt, synthetic construct
  source 1..20: mol_type = other RNA
cgataaagttcagtatccat

SEQ ID NO: 20632 - RNA, 20 nt, synthetic construct
  source 1..20: mol_type = other RNA
aaagttcagtatccattgga

SEQ ID NO: 20633 - RNA, 20 nt, synthetic construct
  source 1..20: mol_type = other RNA
aatgtcatccgctaactgaa

SEQ ID NO: 20634 - RNA, 20 nt, synthetic construct
  source 1..20: mol_type = other RNA
tacacagcagcgctcccagt

SEQ ID NO: 20635 - RNA, 20 nt, synthetic construct
  source 1..20: mol_type = other RNA
gcgccttggctacgccaaag

SEQ ID NO: 20636 - RNA, 20 nt, synthetic construct
  source 1..20: mol_type = other RNA
cgccttggctacgccaaagc

SEQ ID NO: 20637 - RNA, 20 nt, synthetic construct
  source 1..20: mol_type = other RNA
cttcacatcgttgtcaaagg

SEQ ID NO: 20638 - RNA, 20 nt, synthetic construct
  source 1..20: mol_type = other RNA
ttcacatcgttgtcaaagga

SEQ ID NO: 20639 - RNA, 20 nt, synthetic construct
  source 1..20: mol_type = other RNA
cgtgaaagtactccactgct

SEQ ID NO: 20640 - RNA, 20 nt, synthetic construct
  source 1..20: mol_type = other RNA
cgcactggttaacggtactg

SEQ ID NO: 20641 - RNA, 20 nt, synthetic construct
  source 1..20: mol_type = other RNA
actggttaacggtactgagg

SEQ ID NO: 20642 - RNA, 20 nt, synthetic construct
  source 1..20: mol_type = other RNA
cggtatagggcttgagtagt

SEQ ID NO: 20643 - RNA, 20 nt, synthetic construct
  source 1..20: mol_type = other RNA
agttggcaatactcttaaac

SEQ ID NO: 20644 - RNA, 20 nt, synthetic construct
  source 1..20: mol_type = other RNA
ttggcaatactcttaaaccg

SEQ ID NO: 20645 - RNA, 20 nt, synthetic construct
  source 1..20: mol_type = other RNA
tgagtaccggtatgtcttct

SEQ ID NO: 20646 - RNA, 20 nt, synthetic construct
  source 1..20: mol_type = other RNA
tctgccgtgttgcgaatctt

SEQ ID NO: 20647 - RNA, 20 nt, synthetic construct
  source 1..20: mol_type = other RNA
aagcatcggcacgcccgtgt

SEQ ID NO: 20648 - RNA, 20 nt, synthetic construct
  source 1..20: mol_type = other RNA
cggcacgcccgtgtaggtac

SEQ ID NO: 20649 - RNA, 20 nt, synthetic construct
  source 1..20: mol_type = other RNA
cacgcccgtgtaggtactgg

SEQ ID NO: 20650 - RNA, 20 nt, synthetic construct
  source 1..20: mol_type = other RNA
gaatatatccgttatagtgc

SEQ ID NO: 20651 - RNA, 20 nt, synthetic construct
  source 1..20: mol_type = other RNA
tatccgttatagtgctggcc

SEQ ID NO: 20652 - RNA, 20 nt, synthetic construct
  source 1..20: mol_type = other RNA
ggcccggcatctgatcgcca

SEQ ID NO: 20653 - RNA, 20 nt, synthetic construct
  source 1..20: mol_type = other RNA
tgctcgctgaacctcgtaga

SEQ ID NO: 20654 - RNA, 20 nt, synthetic construct
  source 1..20: mol_type = other RNA
gaacaacattgcgcctaatt

SEQ ID NO: 20655 - RNA, 20 nt, synthetic construct
  source 1..20: mol_type = other RNA
tcagaataccggttatgacg

SEQ ID NO: 20656 - RNA, 20 nt, synthetic construct
  source 1..20: mol_type = other RNA
aggtggatctgacctataat

SEQ ID NO: 20657 - RNA, 20 nt, synthetic construct
  source 1..20: mol_type = other RNA
aggcataattacctcttgta

SEQ ID NO: 20658 - RNA, 20 nt, synthetic construct
  source 1..20: mol_type = other RNA
ggcataattacctcttgtag

SEQ ID NO: 20659 - RNA, 20 nt, synthetic construct
  source 1..20: mol_type = other RNA
tctagctcattagacacgga

SEQ ID NO: 20660 - RNA, 20 nt, synthetic construct
  source 1..20: mol_type = other RNA
ctagctcattagacacggat

SEQ ID NO: 20661 - RNA, 20 nt, synthetic construct
  source 1..20: mol_type = other RNA
tagctcattagacacggatg

SEQ ID NO: 20662 - RNA, 20 nt, synthetic construct
  source 1..20: mol_type = other RNA
tggttgaatgtcttctgctc

SEQ ID NO: 20663 - RNA, 20 nt, synthetic construct
  source 1..20: mol_type = other RNA
ggtgtatcttgattaaactc

SEQ ID NO: 20664 - RNA, 20 nt, synthetic construct
  source 1..20: mol_type = other RNA
ttagttgttgttctagatcg

SEQ ID NO: 20665 - RNA, 20 nt, synthetic construct
  source 1..20: mol_type = other RNA
gttgttctagatcgtggcac

SEQ ID NO: 20666 - RNA, 20 nt, synthetic construct
  source 1..20: mol_type = other RNA
cgtggcacaggatagttatc

SEQ ID NO: 20667 - RNA, 20 nt, synthetic construct
  source 1..20: mol_type = other RNA
cttactatagtcctcgaatg

SEQ ID NO: 20668 - RNA, 20 nt, synthetic construct
  source 1..20: mol_type = other RNA
tgtggcacgggataattgtt

SEQ ID NO: 20669 - RNA, 20 nt, synthetic construct
  source 1..20: mol_type = other RNA
aaaggagttgaacaagtcgc

SEQ ID NO: 20670 - RNA, 20 nt, synthetic construct
  source 1..20: mol_type = other RNA
atactgatattccgtaacaa

SEQ ID NO: 20671 - RNA, 20 nt, synthetic construct
  source 1..20: mol_type = other RNA
tgggaagcggcactgtacta

SEQ ID NO: 20672 - RNA, 20 nt, synthetic construct
  source 1..20: mol_type = other RNA
acgaagattggcgggtaaat

SEQ ID NO: 20673 - RNA, 20 nt, synthetic construct
  source 1..20: mol_type = other RNA
cgggtaaatcggtgtcatct

SEQ ID NO: 20674 - RNA, 20 nt, synthetic construct
  source 1..20: mol_type = other RNA
cttccctgaatgggtcgtta

SEQ ID NO: 20675 - RNA, 20 nt, synthetic construct
  source 1..20: mol_type = other RNA
tctacccgtatcgtatcatc

SEQ ID NO: 20676 - RNA, 20 nt, synthetic construct
  source 1..20: mol_type = other RNA
aatcccgctatccgtgtgaa

SEQ ID NO: 20677 - RNA, 20 nt, synthetic construct
  source 1..20: mol_type = other RNA
tgtccagttgcctaattgaa

SEQ ID NO: 20678 - RNA, 20 nt, synthetic construct
  source 1..20: mol_type = other RNA
atatcggcctgaagctcatt

SEQ ID NO: 20679 - RNA, 20 nt, synthetic construct
  source 1..20: mol_type = other RNA
atgtgtaaagggatgcgctc

SEQ ID NO: 20680 - RNA, 20 nt, synthetic construct
  source 1..20: mol_type = other RNA
gcgctcaggatctgctaaat

SEQ ID NO: 20681 - RNA, 20 nt, synthetic construct
  source 1..20: mol_type = other RNA
ggtgtattctgtgcttgcac

SEQ ID NO: 20682 - RNA, 20 nt, synthetic construct
  source 1..20: mol_type = other RNA
gcttgcacaagtgcttgcac

SEQ ID NO: 20683 - RNA, 20 nt, synthetic construct
  source 1..20: mol_type = other RNA
tatcttattagggcgcatag

SEQ ID NO: 20684 - RNA, 20 nt, synthetic construct
  source 1..20: mol_type = other RNA
caagtattgtcataccgaca

SEQ ID NO: 20685 - RNA, 20 nt, synthetic construct
  source 1..20: mol_type = other RNA
ggttgtattcaagaattgat

SEQ ID NO: 20686 - RNA, 20 nt, synthetic construct
  source 1..20: mol_type = other RNA
ttaaccctaaccgtcactat

SEQ ID NO: 20687 - RNA, 20 nt, synthetic construct
  source 1..20: mol_type = other RNA
gggaccaaacaagatccctg

SEQ ID NO: 20688 - RNA, 20 nt, synthetic construct
  source 1..20: mol_type = other RNA
ttgcgtaaacttaccggagt

SEQ ID NO: 20689 - RNA, 20 nt, synthetic construct
  source 1..20: mol_type = other RNA
tgcgtaaacttaccggagta

SEQ ID NO: 20690 - RNA, 20 nt, synthetic construct
  source 1..20: mol_type = other RNA
tgagtgggaatctatctgta

SEQ ID NO: 20691 - RNA, 20 nt, synthetic construct
  source 1..20: mol_type = other RNA
ggatacgttaatatgaccac

SEQ ID NO: 20692 - RNA, 20 nt, synthetic construct
  source 1..20: mol_type = other RNA
gatacgttaatatgaccact

SEQ ID NO: 20693 - RNA, 20 nt, synthetic construct
  source 1..20: mol_type = other RNA
cgttaatatgaccactgggt

SEQ ID NO: 20694 - RNA, 20 nt, synthetic construct
  source 1..20: mol_type = other RNA
ctgggttggtattcctcccg

SEQ ID NO: 20695 - RNA, 20 nt, synthetic construct
  source 1..20: mol_type = other RNA
aaggtaatcatcatcgcacc

SEQ ID NO: 20696 - RNA, 20 nt, synthetic construct
  source 1..20: mol_type = other RNA
catcatcgcacccggatcat

SEQ ID NO: 20697 - RNA, 20 nt, synthetic construct
  source 1..20: mol_type = other RNA
atcatcgcacccggatcatc

SEQ ID NO: 20698 - RNA, 20 nt, synthetic construct
  source 1..20: mol_type = other RNA
tcatcgcacccggatcatcg

SEQ ID NO: 20699 - RNA, 20 nt, synthetic construct
  source 1..20: mol_type = other RNA
taattgcattgcctccgtag

SEQ ID NO: 20700 - RNA, 20 nt, synthetic construct
  source 1..20: mol_type = other RNA
aatgtgatcggatacgtaac

SEQ ID NO: 20701 - RNA, 20 nt, synthetic construct
  source 1..20: mol_type = other RNA
atgtgatcggatacgtaacg

SEQ ID NO: 20702 - RNA, 20 nt, synthetic construct
  source 1..20: mol_type = other RNA
gatatagatgaacatgcgtc

SEQ ID NO: 20703 - RNA, 20 nt, synthetic construct
  source 1..20: mol_type = other RNA
cctgaaagcttatctctgcg

SEQ ID NO: 20704 - RNA, 20 nt, synthetic construct
  source 1..20: mol_type = other RNA
cttatctctgcgtggtgagt

SEQ ID NO: 20705 - RNA, 20 nt, synthetic construct
  source 1..20: mol_type = other RNA
gtccgaacttgtgccaatct

SEQ ID NO: 20706 - RNA, 20 nt, synthetic construct
  source 1..20: mol_type = other RNA
tgatcggagatgttccaggt

SEQ ID NO: 20707 - RNA, 20 nt, synthetic construct
  source 1..20: mol_type = other RNA
aaagcgtatattgcgtctac

SEQ ID NO: 20708 - RNA, 20 nt, synthetic construct
  source 1..20: mol_type = other RNA
aagcgtatattgcgtctact

SEQ ID NO: 20709 - RNA, 20 nt, synthetic construct
  source 1..20: mol_type = other RNA
agcgtatattgcgtctactg

SEQ ID NO: 20710 - RNA, 20 nt, synthetic construct
  source 1..20: mol_type = other RNA
ggtgataaagcgctcgccga

SEQ ID NO: 20711 - RNA, 20 nt, synthetic construct
  source 1..20: mol_type = other RNA
gtgataaagcgctcgccgaa

SEQ ID NO: 20712 - RNA, 20 nt, synthetic construct
  source 1..20: mol_type = other RNA
aaagcgctcgccgaagggaa

SEQ ID NO: 20713 - RNA, 20 nt, synthetic construct
  source 1..20: mol_type = other RNA
gccgaagggaatggataccg

SEQ ID NO: 20714 - RNA, 20 nt, synthetic construct
  source 1..20: mol_type = other RNA
agcttaatccagagcgcaag

SEQ ID NO: 20715 - RNA, 20 nt, synthetic construct
  source 1..20: mol_type = other RNA
ttaatccagagcgcaagagg

SEQ ID NO: 20716 - RNA, 20 nt, synthetic construct
  source 1..20: mol_type = other RNA
agatacgttgcgtccgtaat

SEQ ID NO: 20717 - RNA, 20 nt, synthetic construct
  source 1..20: mol_type = other RNA
ttccctccaccgatacctcc

SEQ ID NO: 20718 - RNA, 20 nt, synthetic construct
  source 1..20: mol_type = other RNA
catccgaactatattcgtcc

SEQ ID NO: 20719 - RNA, 20 nt, synthetic construct
  source 1..20: mol_type = other RNA
atccgaactatattcgtcca

SEQ ID NO: 20720 - RNA, 20 nt, synthetic construct
  source 1..20: mol_type = other RNA
gggatctacaagcgtgtaaa

SEQ ID NO: 20721 - RNA, 20 nt, synthetic construct
  source 1..20: mol_type = other RNA
gtgtaaacggcgccctctaa

SEQ ID NO: 20722 - RNA, 20 nt, synthetic construct
  source 1..20: mol_type = other RNA
cggcgccctctaaaggtgtt

SEQ ID NO: 20723 - RNA, 20 nt, synthetic construct
  source 1..20: mol_type = other RNA
tcccagtcatatccgttgcg

SEQ ID NO: 20724 - RNA, 20 nt, synthetic construct
  source 1..20: mol_type = other RNA
atctgggccgtgccctgaat

SEQ ID NO: 20725 - RNA, 20 nt, synthetic construct
  source 1..20: mol_type = other RNA
ctgaatcggagcatcctgcc

SEQ ID NO: 20726 - RNA, 20 nt, synthetic construct
  source 1..20: mol_type = other RNA
gacatgcacccaatatatgg

SEQ ID NO: 20727 - RNA, 20 nt, synthetic construct
  source 1..20: mol_type = other RNA
tcaaaccctactggaacata

SEQ ID NO: 20728 - RNA, 20 nt, synthetic construct
  source 1..20: mol_type = other RNA
cctgctattaagcaagtctt

SEQ ID NO: 20729 - RNA, 20 nt, synthetic construct
  source 1..20: mol_type = other RNA
gtgtggtgcgccgctgcatg

SEQ ID NO: 20730 - RNA, 20 nt, synthetic construct
  source 1..20: mol_type = other RNA
gtgcgccgctgcatgaggtg

SEQ ID NO: 20731 - RNA, 20 nt, synthetic construct
  source 1..20: mol_type = other RNA
cgctgcatgaggtgcggcca

SEQ ID NO: 20732 - RNA, 20 nt, synthetic construct
  source 1..20: mol_type = other RNA
cgcataagatgtagctacat

SEQ ID NO: 20733 - RNA, 20 nt, synthetic construct
  source 1..20: mol_type = other RNA
agatgtagctacatgggatg

SEQ ID NO: 20734 - RNA, 20 nt, synthetic construct
  source 1..20: mol_type = other RNA
atgtaaggatcgtgatgtgt

SEQ ID NO: 20735 - RNA, 20 nt, synthetic construct
  source 1..20: mol_type = other RNA
tgtaaggatcgtgatgtgtt

SEQ ID NO: 20736 - RNA, 20 nt, synthetic construct
  source 1..20: mol_type = other RNA
ttgtgcaggccggtgtagtc

SEQ ID NO: 20737 - RNA, 20 nt, synthetic construct
  source 1..20: mol_type = other RNA
tgtagtctggcctatagtta

SEQ ID NO: 20738 - RNA, 20 nt, synthetic construct
  source 1..20: mol_type = other RNA
tctggcctatagttaaggaa

SEQ ID NO: 20739 - RNA, 20 nt, synthetic construct
  source 1..20: mol_type = other RNA
tgcatagaggaatctattgt

SEQ ID NO: 20740 - RNA, 20 nt, synthetic construct
  source 1..20: mol_type = other RNA
tagtcttacgctcataatca

SEQ ID NO: 20741 - RNA, 20 nt, synthetic construct
  source 1..20: mol_type = other RNA
tggaccgtagatgattaata

SEQ ID NO: 20742 - RNA, 20 nt, synthetic construct
  source 1..20: mol_type = other RNA
accgtagatgattaataagg

SEQ ID NO: 20743 - RNA, 20 nt, synthetic construct
  source 1..20: mol_type = other RNA
gcgtagaaagagaataaccg

SEQ ID NO: 20744 - RNA, 20 nt, synthetic construct
  source 1..20: mol_type = other RNA
gtgaactactgttgcatgca

SEQ ID NO: 20745 - RNA, 20 nt, synthetic construct
  source 1..20: mol_type = other RNA
tactgttgcatgcaaggcct

SEQ ID NO: 20746 - RNA, 20 nt, synthetic construct
  source 1..20: mol_type = other RNA
tgtcagtacatacgctatcg

SEQ ID NO: 20747 - RNA, 20 nt, synthetic construct
  source 1..20: mol_type = other RNA
tgccgccgtgtaccttatcg

SEQ ID NO: 20748 - RNA, 20 nt, synthetic construct
  source 1..20: mol_type = other RNA
aagctcttcatcgaaatgat

SEQ ID NO: 20749 - RNA, 20 nt, synthetic construct
  source 1..20: mol_type = other RNA
tcttcatcgaaatgatcggt

SEQ ID NO: 20750 - RNA, 20 nt, synthetic construct
  source 1..20: mol_type = other RNA
ctcatcgtataggagggcgc

SEQ ID NO: 20751 - RNA, 20 nt, synthetic construct
  source 1..20: mol_type = other RNA
ggagggcgccggcttaatgt

SEQ ID NO: 20752 - RNA, 20 nt, synthetic construct
  source 1..20: mol_type = other RNA
gcttaatgtaggaaatccac

SEQ ID NO: 20753 - RNA, 20 nt, synthetic construct
  source 1..20: mol_type = other RNA
cttaatgtaggaaatccact

SEQ ID NO: 20754 - RNA, 20 nt, synthetic construct
  source 1..20: mol_type = other RNA
atagtgcacatcaacataag

SEQ ID NO: 20755 - RNA, 20 nt, synthetic construct
  source 1..20: mol_type = other RNA
gctagaatgggtaacccatt

SEQ ID NO: 20756 - RNA, 20 nt, synthetic construct
  source 1..20: mol_type = other RNA
ggaaacagtagtgaatacgg

SEQ ID NO: 20757 - RNA, 20 nt, synthetic construct
  source 1..20: mol_type = other RNA
gaaacagtagtgaatacgga

SEQ ID NO: 20758 - RNA, 20 nt, synthetic construct
  source 1..20: mol_type = other RNA
cagccttgcatgttcgcata

SEQ ID NO: 20759 - RNA, 20 nt, synthetic construct
  source 1..20: mol_type = other RNA
aatgttgcaaatcgccgagc

SEQ ID NO: 20760 - RNA, 20 nt, synthetic construct
  source 1..20: mol_type = other RNA
aaggcattgaactgcaactt

SEQ ID NO: 20761 - RNA, 20 nt, synthetic construct
  source 1..20: mol_type = other RNA
aagatcttatcagcgtacat

SEQ ID NO: 20762 - RNA, 20 nt, synthetic construct
  source 1..20: mol_type = other RNA
agaactataccaaagtaggt

SEQ ID NO: 20763 - RNA, 20 nt, synthetic construct
  source 1..20: mol_type = other RNA
gctaataatgtagtccacaa

SEQ ID NO: 20764 - RNA, 20 nt, synthetic construct
  source 1..20: mol_type = other RNA
gcggccgcaatataaactgt

SEQ ID NO: 20765 - RNA, 20 nt, synthetic construct
  source 1..20: mol_type = other RNA
tagggtcgaatactggcagg

SEQ ID NO: 20766 - RNA, 20 nt, synthetic construct
  source 1..20: mol_type = other RNA
tatatatattaataagaccg

SEQ ID NO: 20767 - RNA, 20 nt, synthetic construct
  source 1..20: mol_type = other RNA
attaataagaccgcggtcga

SEQ ID NO: 20768 - RNA, 20 nt, synthetic construct
  source 1..20: mol_type = other RNA
acataactcatcatacgtgt

SEQ ID NO: 20769 - RNA, 20 nt, synthetic construct
  source 1..20: mol_type = other RNA
actcatcatacgtgtaggac

SEQ ID NO: 20770 - RNA, 20 nt, synthetic construct
  source 1..20: mol_type = other RNA
tcatacgtgtaggactggag

SEQ ID NO: 20771 - RNA, 20 nt, synthetic construct
  source 1..20: mol_type = other RNA
catacgtgtaggactggagg

SEQ ID NO: 20772 - RNA, 20 nt, synthetic construct
  source 1..20: mol_type = other RNA
atacgtgtaggactggaggg

SEQ ID NO: 20773 - RNA, 20 nt, synthetic construct
  source 1..20: mol_type = other RNA
taaagcatgttccgcgtccg

SEQ ID NO: 20774 - RNA, 20 nt, synthetic construct
  source 1..20: mol_type = other RNA
gccttattctgctgaggata

SEQ ID NO: 20775 - RNA, 20 nt, synthetic construct
  source 1..20: mol_type = other RNA
gggccgcagatcaaagtcga

SEQ ID NO: 20776 - RNA, 20 nt, synthetic construct
  source 1..20: mol_type = other RNA
ggccgcagatcaaagtcgat

SEQ ID NO: 20777 - RNA, 20 nt, synthetic construct
  source 1..20: mol_type = other RNA
gggaatgtcgtcatgaatgt

SEQ ID NO: 20778 - RNA, 20 nt, synthetic construct
  source 1..20: mol_type = other RNA
acataaactcgctcatagac

SEQ ID NO: 20779 - RNA, 20 nt, synthetic construct
  source 1..20: mol_type = other RNA
ttcgtccgtgtcaaagataa

SEQ ID NO: 20780 - RNA, 20 nt, synthetic construct
  source 1..20: mol_type = other RNA
taatggctatcttcttcgat

SEQ ID NO: 20781 - RNA, 20 nt, synthetic construct
  source 1..20: mol_type = other RNA
acagtgaaggtcgtagcata

SEQ ID NO: 20782 - RNA, 20 nt, synthetic construct
  source 1..20: mol_type = other RNA
ggtcgtagcatatggcaaca

SEQ ID NO: 20783 - RNA, 20 nt, synthetic construct
  source 1..20: mol_type = other RNA
aatatagtactgcggcgtgt

SEQ ID NO: 20784 - RNA, 20 nt, synthetic construct
  source 1..20: mol_type = other RNA
agaaaggcaatccggttcac

SEQ ID NO: 20785 - RNA, 20 nt, synthetic construct
  source 1..20: mol_type = other RNA
ctacaaacgtgtgcttggtg

SEQ ID NO: 20786 - RNA, 20 nt, synthetic construct
  source 1..20: mol_type = other RNA
cttctagtaggcttagatga

SEQ ID NO: 20787 - RNA, 20 nt, synthetic construct
  source 1..20: mol_type = other RNA
aggcttagatgagggtagtc

SEQ ID NO: 20788 - RNA, 20 nt, synthetic construct
  source 1..20: mol_type = other RNA
tgcgggcagctatagtaggc

SEQ ID NO: 20789 - RNA, 20 nt, synthetic construct
  source 1..20: mol_type = other RNA
ctcggcctctgagtaaatga

SEQ ID NO: 20790 - RNA, 20 nt, synthetic construct
  source 1..20: mol_type = other RNA
tcggcctctgagtaaatgac

SEQ ID NO: 20791 - RNA, 20 nt, synthetic construct
  source 1..20: mol_type = other RNA
gagtaaatgacgggtggccg

SEQ ID NO: 20792 - RNA, 20 nt, synthetic construct
  source 1..20: mol_type = other RNA
agtaaatgacgggtggccgt

SEQ ID NO: 20793 - RNA, 20 nt, synthetic construct
  source 1..20: mol_type = other RNA
cctgcgtgtcgtacttgcgc

SEQ ID NO: 20794 - RNA, 20 nt, synthetic construct
  source 1..20: mol_type = other RNA
cgtacttgcgcaggtcatac

SEQ ID NO: 20795 - RNA, 20 nt, synthetic construct
  source 1..20: mol_type = other RNA
ttgcgcaggtcatacaggtc

SEQ ID NO: 20796 - RNA, 20 nt, synthetic construct
  source 1..20: mol_type = other RNA
tgcgcaggtcatacaggtcg

SEQ ID NO: 20797 - RNA, 20 nt, synthetic construct
  source 1..20: mol_type = other RNA
ttgaagcgcacgtagctgag

SEQ ID NO: 20798 - RNA, 20 nt, synthetic construct
  source 1..20: mol_type = other RNA
cccttgctagaaagcgtata

SEQ ID NO: 20799 - RNA, 20 nt, synthetic construct
  source 1..20: mol_type = other RNA
agaaagcgtatagggccaaa

SEQ ID NO: 20800 - RNA, 20 nt, synthetic construct
  source 1..20: mol_type = other RNA
acaccacggagttaaagtcg

SEQ ID NO: 20801 - RNA, 20 nt, synthetic construct
  source 1..20: mol_type = other RNA
caggctccgtggaagttatg

SEQ ID NO: 20802 - RNA, 20 nt, synthetic construct
  source 1..20: mol_type = other RNA
tgaggaatatcgggagtagc

SEQ ID NO: 20803 - RNA, 20 nt, synthetic construct
  source 1..20: mol_type = other RNA
tatcgggagtagccggaaat

SEQ ID NO: 20804 - RNA, 20 nt, synthetic construct
  source 1..20: mol_type = other RNA
ggcaatgacttgttgtgctc

SEQ ID NO: 20805 - RNA, 20 nt, synthetic construct
  source 1..20: mol_type = other RNA
cgtaatagagtaagtcaaat

SEQ ID NO: 20806 - RNA, 20 nt, synthetic construct
  source 1..20: mol_type = other RNA
gtaattatcctccatggcaa

SEQ ID NO: 20807 - RNA, 20 nt, synthetic construct
  source 1..20: mol_type = other RNA
aaatgtgttgtctataaggg

SEQ ID NO: 20808 - RNA, 20 nt, synthetic construct
  source 1..20: mol_type = other RNA
tatctccgcccaccacgtat

SEQ ID NO: 20809 - RNA, 20 nt, synthetic construct
  source 1..20: mol_type = other RNA
atctccgcccaccacgtatt

SEQ ID NO: 20810 - RNA, 20 nt, synthetic construct
  source 1..20: mol_type = other RNA
ttataaagagtaactcgtag

SEQ ID NO: 20811 - RNA, 20 nt, synthetic construct
  source 1..20: mol_type = other RNA
accgttctgagattgttgca

SEQ ID NO: 20812 - RNA, 20 nt, synthetic construct
  source 1..20: mol_type = other RNA
ccgttctgagattgttgcac

SEQ ID NO: 20813 - RNA, 20 nt, synthetic construct
  source 1..20: mol_type = other RNA
gattgttgcacgggagaacc

SEQ ID NO: 20814 - RNA, 20 nt, synthetic construct
  source 1..20: mol_type = other RNA
acggttacaaagcagaagta

SEQ ID NO: 20815 - RNA, 20 nt, synthetic construct
  source 1..20: mol_type = other RNA
aaatattgcgtatgaacggc

SEQ ID NO: 20816 - RNA, 20 nt, synthetic construct
  source 1..20: mol_type = other RNA
tatgggttacaacaccgccg

SEQ ID NO: 20817 - RNA, 20 nt, synthetic construct
  source 1..20: mol_type = other RNA
cacaacctgttactaccgaa

SEQ ID NO: 20818 - RNA, 20 nt, synthetic construct
  source 1..20: mol_type = other RNA
cactattcctacgagcctcg

SEQ ID NO: 20819 - RNA, 20 nt, synthetic construct
  source 1..20: mol_type = other RNA
ttcctacgagcctcgcggct

SEQ ID NO: 20820 - RNA, 20 nt, synthetic construct
  source 1..20: mol_type = other RNA
agcctcgcggcttggtacac

SEQ ID NO: 20821 - RNA, 20 nt, synthetic construct
  source 1..20: mol_type = other RNA
cacagaccacagcatcgtta

SEQ ID NO: 20822 - RNA, 20 nt, synthetic construct
  source 1..20: mol_type = other RNA
agagacctatagccctgtta

SEQ ID NO: 20823 - RNA, 20 nt, synthetic construct
  source 1..20: mol_type = other RNA
ccctgttaagggaaccgttc

SEQ ID NO: 20824 - RNA, 20 nt, synthetic construct
  source 1..20: mol_type = other RNA
aaccgttccggacccaaatc

SEQ ID NO: 20825 - RNA, 20 nt, synthetic construct
  source 1..20: mol_type = other RNA
cccaaatcaggcaaacgacg

SEQ ID NO: 20826 - RNA, 20 nt, synthetic construct
  source 1..20: mol_type = other RNA
agcgagcacgtgcatcacta

SEQ ID NO: 20827 - RNA, 20 nt, synthetic construct
  source 1..20: mol_type = other RNA
ttgctgaacagttcagccgc

SEQ ID NO: 20828 - RNA, 20 nt, synthetic construct
  source 1..20: mol_type = other RNA
tgctgaacagttcagccgct

SEQ ID NO: 20829 - RNA, 20 nt, synthetic construct
  source 1..20: mol_type = other RNA
tgggctcctgatatatgcac

SEQ ID NO: 20830 - RNA, 20 nt, synthetic construct
  source 1..20: mol_type = other RNA
tcaatgattctcggtacgac

SEQ ID NO: 20831 - RNA, 20 nt, synthetic construct
  source 1..20: mol_type = other RNA
aaattgtgggttagattcga

SEQ ID NO: 20832 - RNA, 20 nt, synthetic construct
  source 1..20: mol_type = other RNA
gtatgactgtatctactacg

SEQ ID NO: 20833 - RNA, 20 nt, synthetic construct
  source 1..20: mol_type = other RNA
gactgtatctactacgcggg

SEQ ID NO: 20834 - RNA, 20 nt, synthetic construct
  source 1..20: mol_type = other RNA
ctactacgcgggaggacata

SEQ ID NO: 20835 - RNA, 20 nt, synthetic construct
  source 1..20: mol_type = other RNA
tatgctatccatgatgagta

SEQ ID NO: 20836 - RNA, 20 nt, synthetic construct
  source 1..20: mol_type = other RNA
ttgcttgcagcaccattgct

SEQ ID NO: 20837 - RNA, 20 nt, synthetic construct
  source 1..20: mol_type = other RNA
gcttgcagcaccattgctcg

SEQ ID NO: 20838 - RNA, 20 nt, synthetic construct
  source 1..20: mol_type = other RNA
gaacaggataaacccaccac

SEQ ID NO: 20839 - RNA, 20 nt, synthetic construct
  source 1..20: mol_type = other RNA
acaatcgtctcgtggaagga

SEQ ID NO: 20840 - RNA, 20 nt, synthetic construct
  source 1..20: mol_type = other RNA
tgtatccatgaatcccatcc

SEQ ID NO: 20841 - RNA, 20 nt, synthetic construct
  source 1..20: mol_type = other RNA
agccggaggagtcaccagtt

SEQ ID NO: 20842 - RNA, 20 nt, synthetic construct
  source 1..20: mol_type = other RNA
gccggaggagtcaccagttc

SEQ ID NO: 20843 - RNA, 20 nt, synthetic construct
  source 1..20: mol_type = other RNA
aaaggttacggcatcaagta

SEQ ID NO: 20844 - RNA, 20 nt, synthetic construct
  source 1..20: mol_type = other RNA
catgtctacactatgcgccg

SEQ ID NO: 20845 - RNA, 20 nt, synthetic construct
  source 1..20: mol_type = other RNA
ccgaggtgaatgaatacctg

SEQ ID NO: 20846 - RNA, 20 nt, synthetic construct
  source 1..20: mol_type = other RNA
gaatacctgcggcaagataa

SEQ ID NO: 20847 - RNA, 20 nt, synthetic construct
  source 1..20: mol_type = other RNA
tggcaccagttacctacgta

SEQ ID NO: 20848 - RNA, 20 nt, synthetic construct
  source 1..20: mol_type = other RNA
ttacctacgtatggcctacg

SEQ ID NO: 20849 - RNA, 20 nt, synthetic construct
  source 1..20: mol_type = other RNA
cggaatagatatcattaagc

SEQ ID NO: 20850 - RNA, 20 nt, synthetic construct
  source 1..20: mol_type = other RNA
aacgataggtacgcgaatta

SEQ ID NO: 20851 - RNA, 20 nt, synthetic construct
  source 1..20: mol_type = other RNA
acttcatccaaacagatgcg

SEQ ID NO: 20852 - RNA, 20 nt, synthetic construct
  source 1..20: mol_type = other RNA
ttatgtctcgcatgcacgct

SEQ ID NO: 20853 - RNA, 20 nt, synthetic construct
  source 1..20: mol_type = other RNA
acgcttctcctacgttatcg

SEQ ID NO: 20854 - RNA, 20 nt, synthetic construct
  source 1..20: mol_type = other RNA
ggttgaacagcgtgctactt

SEQ ID NO: 20855 - RNA, 20 nt, synthetic construct
  source 1..20: mol_type = other RNA
aagcccgctggtaagcccgc

SEQ ID NO: 20856 - RNA, 20 nt, synthetic construct
  source 1..20: mol_type = other RNA
agccggcaatgcgctgatgc

SEQ ID NO: 20857 - RNA, 20 nt, synthetic construct
  source 1..20: mol_type = other RNA
tgtacaagccttatacaata

SEQ ID NO: 20858 - RNA, 20 nt, synthetic construct
  source 1..20: mol_type = other RNA
gtacaagccttatacaataa

SEQ ID NO: 20859 - RNA, 20 nt, synthetic construct
  source 1..20: mol_type = other RNA
tacaagccttatacaataag

SEQ ID NO: 20860 - RNA, 20 nt, synthetic construct
  source 1..20: mol_type = other RNA
tattaaagctgaataagacg

SEQ ID NO: 20861 - RNA, 20 nt, synthetic construct
  source 1..20: mol_type = other RNA
gtctagaacattcattcagc

SEQ ID NO: 20862 - RNA, 20 nt, synthetic construct
  source 1..20: mol_type = other RNA
gataaccagtgtcccagtcg

SEQ ID NO: 20863 - RNA, 20 nt, synthetic construct
  source 1..20: mol_type = other RNA
ataaccagtgtcccagtcga

SEQ ID NO: 20864 - RNA, 20 nt, synthetic construct
  source 1..20: mol_type = other RNA
gaacccgtactctgtaatgc

SEQ ID NO: 20865 - RNA, 20 nt, synthetic construct
  source 1..20: mol_type = other RNA
aacccgtactctgtaatgct

SEQ ID NO: 20866 - RNA, 20 nt, synthetic construct
  source 1..20: mol_type = other RNA
ttctgaactgcgagagttct

SEQ ID NO: 20867 - RNA, 20 nt, synthetic construct
  source 1..20: mol_type = other RNA
atgggatgtcgcatatctct

SEQ ID NO: 20868 - RNA, 20 nt, synthetic construct
  source 1..20: mol_type = other RNA
atctctaggtgccatacgaa

SEQ ID NO: 20869 - RNA, 20 nt, synthetic construct
  source 1..20: mol_type = other RNA
tctctaggtgccatacgaac

SEQ ID NO: 20870 - RNA, 20 nt, synthetic construct
  source 1..20: mol_type = other RNA
cgtgcaactcgtcctgtgct

SEQ ID NO: 20871 - RNA, 20 nt, synthetic construct
  source 1..20: mol_type = other RNA
cgtaaagggtgtcattataa

SEQ ID NO: 20872 - RNA, 20 nt, synthetic construct
  source 1..20: mol_type = other RNA
taattgtgctcgcactgtta

SEQ ID NO: 20873 - RNA, 20 nt, synthetic construct
  source 1..20: mol_type = other RNA
aattgtgctcgcactgttac

SEQ ID NO: 20874 - RNA, 20 nt, synthetic construct
  source 1..20: mol_type = other RNA
tgagcggctgcaatgacctc

SEQ ID NO: 20875 - RNA, 20 nt, synthetic construct
  source 1..20: mol_type = other RNA
agcggctgcaatgacctcag

SEQ ID NO: 20876 - RNA, 20 nt, synthetic construct
  source 1..20: mol_type = other RNA
tagttaaatccgctataagt

SEQ ID NO: 20877 - RNA, 20 nt, synthetic construct
  source 1..20: mol_type = other RNA
tgaatacctgcggccaaacc

SEQ ID NO: 20878 - RNA, 20 nt, synthetic construct
  source 1..20: mol_type = other RNA
tcatcatagtcaaactgtgt

SEQ ID NO: 20879 - RNA, 20 nt, synthetic construct
  source 1..20: mol_type = other RNA
ggtcggaaagaaacttagga

SEQ ID NO: 20880 - RNA, 20 nt, synthetic construct
  source 1..20: mol_type = other RNA
ggtgatagagactgaaacat

SEQ ID NO: 20881 - RNA, 20 nt, synthetic construct
  source 1..20: mol_type = other RNA
aaattctcgagtgttcatgg

SEQ ID NO: 20882 - RNA, 20 nt, synthetic construct
  source 1..20: mol_type = other RNA
aatatctggctgaggagccg

SEQ ID NO: 20883 - RNA, 20 nt, synthetic construct
  source 1..20: mol_type = other RNA
cctattcccgctgttataat

SEQ ID NO: 20884 - RNA, 20 nt, synthetic construct
  source 1..20: mol_type = other RNA
atcgaagagcctgaatagca

SEQ ID NO: 20885 - RNA, 20 nt, synthetic construct
  source 1..20: mol_type = other RNA
ggcatatctgagagctgtac

SEQ ID NO: 20886 - RNA, 20 nt, synthetic construct
  source 1..20: mol_type = other RNA
aagaggctccttattgtacc

SEQ ID NO: 20887 - RNA, 20 nt, synthetic construct
  source 1..20: mol_type = other RNA
gatggtcggtaagttcatgt

SEQ ID NO: 20888 - RNA, 20 nt, synthetic construct
  source 1..20: mol_type = other RNA
aagttcatgtaggacttcca

SEQ ID NO: 20889 - RNA, 20 nt, synthetic construct
  source 1..20: mol_type = other RNA
ccgacggatagtcctgtcat

SEQ ID NO: 20890 - RNA, 20 nt, synthetic construct
  source 1..20: mol_type = other RNA
tcagattaggacgagccagt

SEQ ID NO: 20891 - RNA, 20 nt, synthetic construct
  source 1..20: mol_type = other RNA
gatgttatcacgtgctaggt

SEQ ID NO: 20892 - RNA, 20 nt, synthetic construct
  source 1..20: mol_type = other RNA
atgttatcacgtgctaggtc

SEQ ID NO: 20893 - RNA, 20 nt, synthetic construct
  source 1..20: mol_type = other RNA
cgcttggctaaagttcccgt

SEQ ID NO: 20894 - RNA, 20 nt, synthetic construct
  source 1..20: mol_type = other RNA
caatgtacgaggctacaagc

SEQ ID NO: 20895 - RNA, 20 nt, synthetic construct
  source 1..20: mol_type = other RNA
catataggcgataacgtcga

SEQ ID NO: 20896 - RNA, 20 nt, synthetic construct
  source 1..20: mol_type = other RNA
ggcatcattgacgttggcat

SEQ ID NO: 20897 - RNA, 20 nt, synthetic construct
  source 1..20: mol_type = other RNA
ttgacgttggcataggttct

SEQ ID NO: 20898 - RNA, 20 nt, synthetic construct
  source 1..20: mol_type = other RNA
attgttggtacgaataagat

SEQ ID NO: 20899 - RNA, 20 nt, synthetic construct
  source 1..20: mol_type = other RNA
ctagtaccacttgctctaca

SEQ ID NO: 20900 - RNA, 20 nt, synthetic construct
  source 1..20: mol_type = other RNA
atattgttcaaagcgctcag

SEQ ID NO: 20901 - RNA, 20 nt, synthetic construct
  source 1..20: mol_type = other RNA
ttcaaagcgctcagagggtt

SEQ ID NO: 20902 - RNA, 20 nt, synthetic construct
  source 1..20: mol_type = other RNA
cgaagttgcagtacattata

SEQ ID NO: 20903 - RNA, 20 nt, synthetic construct
  source 1..20: mol_type = other RNA
tccaggcctaattcaccgcc

SEQ ID NO: 20904 - RNA, 20 nt, synthetic construct
  source 1..20: mol_type = other RNA
ggccatcaaagaatcaatta

SEQ ID NO: 20905 - RNA, 20 nt, synthetic construct
  source 1..20: mol_type = other RNA
ggtgcagtcgcattggtagt

SEQ ID NO: 20906 - RNA, 20 nt, synthetic construct
  source 1..20: mol_type = other RNA
gtcgcattggtagttggatc

SEQ ID NO: 20907 - RNA, 20 nt, synthetic construct
  source 1..20: mol_type = other RNA
tccgagccagtcaataagat

SEQ ID NO: 20908 - RNA, 20 nt, synthetic construct
  source 1..20: mol_type = other RNA
gccagtcaataagattggct

SEQ ID NO: 20909 - RNA, 20 nt, synthetic construct
  source 1..20: mol_type = other RNA
attggctcggttcacgttag

SEQ ID NO: 20910 - RNA, 20 nt, synthetic construct
  source 1..20: mol_type = other RNA
tagcctggcgaatgagttcc

SEQ ID NO: 20911 - RNA, 20 nt, synthetic construct
  source 1..20: mol_type = other RNA
gcccaattcttgttgtaggc

SEQ ID NO: 20912 - RNA, 20 nt, synthetic construct
  source 1..20: mol_type = other RNA
cccaattcttgttgtaggct

SEQ ID NO: 20913 - RNA, 20 nt, synthetic construct
  source 1..20: mol_type = other RNA
taccaagtcccactgggagt

SEQ ID NO: 20914 - RNA, 20 nt, synthetic construct
  source 1..20: mol_type = other RNA
tgggctgcagcattcctgtt

SEQ ID NO: 20915 - RNA, 20 nt, synthetic construct
  source 1..20: mol_type = other RNA
gtatagtgccgggcgccact

SEQ ID NO: 20916 - RNA, 20 nt, synthetic construct
  source 1..20: mol_type = other RNA
tatagtgccgggcgccactt

SEQ ID NO: 20917 - RNA, 20 nt, synthetic construct
  source 1..20: mol_type = other RNA
atagtgccgggcgccacttg

SEQ ID NO: 20918 - RNA, 20 nt, synthetic construct
  source 1..20: mol_type = other RNA
aggactaataaacctatcgg

SEQ ID NO: 20919 - RNA, 20 nt, synthetic construct
  source 1..20: mol_type = other RNA
ggactaataaacctatcgga

SEQ ID NO: 20920 - RNA, 20 nt, synthetic construct
  source 1..20: mol_type = other RNA
atcggagggaagtaattgcg

SEQ ID NO: 20921 - RNA, 20 nt, synthetic construct
  source 1..20: mol_type = other RNA
tgtgtatagccgtcctcatc

SEQ ID NO: 20922 - RNA, 20 nt, synthetic construct
  source 1..20: mol_type = other RNA
gccgtcctcatcaggaagaa

SEQ ID NO: 20923 - RNA, 20 nt, synthetic construct
  source 1..20: mol_type = other RNA
gtgtgataacgccgaacctg

SEQ ID NO: 20924 - RNA, 20 nt, synthetic construct
  source 1..20: mol_type = other RNA
ccaatgttaataagctcaat

SEQ ID NO: 20925 - RNA, 20 nt, synthetic construct
  source 1..20: mol_type = other RNA
aagtaaagttccgctgcctc

SEQ ID NO: 20926 - RNA, 20 nt, synthetic construct
  source 1..20: mol_type = other RNA
gaaggtgaagaagacgtcct

SEQ ID NO: 20927 - RNA, 20 nt, synthetic construct
  source 1..20: mol_type = other RNA
cgttaactctcacagtagag

SEQ ID NO: 20928 - RNA, 20 nt, synthetic construct
  source 1..20: mol_type = other RNA
atgttgaatatattcaagca

SEQ ID NO: 20929 - RNA, 20 nt, synthetic construct
  source 1..20: mol_type = other RNA
tagatctgcaagggcgacat

SEQ ID NO: 20930 - RNA, 20 nt, synthetic construct
  source 1..20: mol_type = other RNA
cccaagcatgtctccaatcc

SEQ ID NO: 20931 - RNA, 20 nt, synthetic construct
  source 1..20: mol_type = other RNA
tggaaagagaacgcccgata

SEQ ID NO: 20932 - RNA, 20 nt, synthetic construct
  source 1..20: mol_type = other RNA
ggcttgctctgacgggacgg

SEQ ID NO: 20933 - RNA, 20 nt, synthetic construct
  source 1..20: mol_type = other RNA
gcttgctctgacgggacgga

SEQ ID NO: 20934 - RNA, 20 nt, synthetic construct
  source 1..20: mol_type = other RNA
gacggagggtaccaacgctt

SEQ ID NO: 20935 - RNA, 20 nt, synthetic construct
  source 1..20: mol_type = other RNA
taccaacgcttcggccttgt

SEQ ID NO: 20936 - RNA, 20 nt, synthetic construct
  source 1..20: mol_type = other RNA
agcattatccgtaaagacgt

SEQ ID NO: 20937 - RNA, 20 nt, synthetic construct
  source 1..20: mol_type = other RNA
gacgttggagtcgttacctg

SEQ ID NO: 20938 - RNA, 20 nt, synthetic construct
  source 1..20: mol_type = other RNA
gttggagtcgttacctgcgg

SEQ ID NO: 20939 - RNA, 20 nt, synthetic construct
  source 1..20: mol_type = other RNA
gagtcgttacctgcggaggt

SEQ ID NO: 20940 - RNA, 20 nt, synthetic construct
  source 1..20: mol_type = other RNA
gcacgccatccaacatctgc

SEQ ID NO: 20941 - RNA, 20 nt, synthetic construct
  source 1..20: mol_type = other RNA
cttccagagctcgatagaag

SEQ ID NO: 20942 - RNA, 20 nt, synthetic construct
  source 1..20: mol_type = other RNA
gcgttaaattggagtaaatc

SEQ ID NO: 20943 - RNA, 20 nt, synthetic construct
  source 1..20: mol_type = other RNA
cgttaaattggagtaaatct

SEQ ID NO: 20944 - RNA, 20 nt, synthetic construct
  source 1..20: mol_type = other RNA
aagtattaattgcctggttg

SEQ ID NO: 20945 - RNA, 20 nt, synthetic construct
  source 1..20: mol_type = other RNA
gaggtcaacctgcgaccgcg

SEQ ID NO: 20946 - RNA, 20 nt, synthetic construct
  source 1..20: mol_type = other RNA
ttcttctcgtgcggctgcgt

SEQ ID NO: 20947 - RNA, 20 nt, synthetic construct
  source 1..20: mol_type = other RNA
aagacttagatcaagcgcga

SEQ ID NO: 20948 - RNA, 20 nt, synthetic construct
  source 1..20: mol_type = other RNA
tctcgaagcctcgttatgtt

SEQ ID NO: 20949 - RNA, 20 nt, synthetic construct
  source 1..20: mol_type = other RNA
cctcgttatgttcggcgtca

SEQ ID NO: 20950 - RNA, 20 nt, synthetic construct
  source 1..20: mol_type = other RNA
cattaaaggtctgtcgcaac

SEQ ID NO: 20951 - RNA, 20 nt, synthetic construct
  source 1..20: mol_type = other RNA
ggtctgtcgcaacaggttca

SEQ ID NO: 20952 - RNA, 20 nt, synthetic construct
  source 1..20: mol_type = other RNA
acgatatactgcttcaatca

SEQ ID NO: 20953 - RNA, 20 nt, synthetic construct
  source 1..20: mol_type = other RNA
attaatgacttcttcattgg

SEQ ID NO: 20954 - RNA, 20 nt, synthetic construct
  source 1..20: mol_type = other RNA
gcgctcgtgaagttgcttaa

SEQ ID NO: 20955 - RNA, 20 nt, synthetic construct
  source 1..20: mol_type = other RNA
ccgcgcgcagtccatgagtt

SEQ ID NO: 20956 - RNA, 20 nt, synthetic construct
  source 1..20: mol_type = other RNA
cgcgcgcagtccatgagtta

SEQ ID NO: 20957 - RNA, 20 nt, synthetic construct
  source 1..20: mol_type = other RNA
ggtggaaccggctcgaggat

SEQ ID NO: 20958 - RNA, 20 nt, synthetic construct
  source 1..20: mol_type = other RNA
gtggaaccggctcgaggatc

SEQ ID NO: 20959 - RNA, 20 nt, synthetic construct
  source 1..20: mol_type = other RNA
ttgtgcaagcatatacagct

SEQ ID NO: 20960 - RNA, 20 nt, synthetic construct
  source 1..20: mol_type = other RNA
tccgcggcaaagtacaaaca

SEQ ID NO: 20961 - RNA, 20 nt, synthetic construct
  source 1..20: mol_type = other RNA
cactccagcggagttcaccg

SEQ ID NO: 20962 - RNA, 20 nt, synthetic construct
  source 1..20: mol_type = other RNA
ctacaccggagtgaaattag

SEQ ID NO: 20963 - RNA, 20 nt, synthetic construct
  source 1..20: mol_type = other RNA
ctgatcgccgactagcggtc

SEQ ID NO: 20964 - RNA, 20 nt, synthetic construct
  source 1..20: mol_type = other RNA
ccgactagcggtctggatca

SEQ ID NO: 20965 - RNA, 20 nt, synthetic construct
  source 1..20: mol_type = other RNA
gcggtctggatcatggagtc

SEQ ID NO: 20966 - RNA, 20 nt, synthetic construct
  source 1..20: mol_type = other RNA
gcgcacgcgtattgccattg

SEQ ID NO: 20967 - RNA, 20 nt, synthetic construct
  source 1..20: mol_type = other RNA
cacgcgtattgccattgagg

SEQ ID NO: 20968 - RNA, 20 nt, synthetic construct
  source 1..20: mol_type = other RNA
ttcggtcctaccggatggaa

SEQ ID NO: 20969 - RNA, 20 nt, synthetic construct
  source 1..20: mol_type = other RNA
catagccgattcggctacta

SEQ ID NO: 20970 - RNA, 20 nt, synthetic construct
  source 1..20: mol_type = other RNA
agccgattcggctactaagg

SEQ ID NO: 20971 - RNA, 20 nt, synthetic construct
  source 1..20: mol_type = other RNA
cgattcggctactaaggagg

SEQ ID NO: 20972 - RNA, 20 nt, synthetic construct
  source 1..20: mol_type = other RNA
ggatgttcctatatgttatt

SEQ ID NO: 20973 - RNA, 20 nt, synthetic construct
  source 1..20: mol_type = other RNA
gcatcacaatgccgtcaata

SEQ ID NO: 20974 - RNA, 20 nt, synthetic construct
  source 1..20: mol_type = other RNA
aacacctaacctagtcgtgc

SEQ ID NO: 20975 - RNA, 20 nt, synthetic construct
  source 1..20: mol_type = other RNA
cggcctgcaccgcacgttga

SEQ ID NO: 20976 - RNA, 20 nt, synthetic construct
  source 1..20: mol_type = other RNA
attacaagtcctgctatgta

SEQ ID NO: 20977 - RNA, 20 nt, synthetic construct
  source 1..20: mol_type = other RNA
tacggcgataagcataccac

SEQ ID NO: 20978 - RNA, 20 nt, synthetic construct
  source 1..20: mol_type = other RNA
caccgccattcccgaagaaa

SEQ ID NO: 20979 - RNA, 20 nt, synthetic construct
  source 1..20: mol_type = other RNA
cttaaaccgcgcgcagcaaa

SEQ ID NO: 20980 - RNA, 20 nt, synthetic construct
  source 1..20: mol_type = other RNA
cacagcgaagcgtaatacaa

SEQ ID NO: 20981 - RNA, 20 nt, synthetic construct
  source 1..20: mol_type = other RNA
tacaacggttaaatatgtta

SEQ ID NO: 20982 - RNA, 20 nt, synthetic construct
  source 1..20: mol_type = other RNA
acggtcaatgtcatagtaaa

SEQ ID NO: 20983 - RNA, 20 nt, synthetic construct
  source 1..20: mol_type = other RNA
tcctcccagtaccgatgaag

SEQ ID NO: 20984 - RNA, 20 nt, synthetic construct
  source 1..20: mol_type = other RNA
gtaccgatgaagaggttata

SEQ ID NO: 20985 - RNA, 20 nt, synthetic construct
  source 1..20: mol_type = other RNA
tcgccgccgttggaagatga

SEQ ID NO: 20986 - RNA, 20 nt, synthetic construct
  source 1..20: mol_type = other RNA
agacggcgttaaggccaatc

SEQ ID NO: 20987 - RNA, 20 nt, synthetic construct
  source 1..20: mol_type = other RNA
gaatcgcattctatgcatga

SEQ ID NO: 20988 - RNA, 20 nt, synthetic construct
  source 1..20: mol_type = other RNA
cattatattcaaacgcaagt

SEQ ID NO: 20989 - RNA, 20 nt, synthetic construct
  source 1..20: mol_type = other RNA
gcacttgatggttcaagtgg

SEQ ID NO: 20990 - RNA, 20 nt, synthetic construct
  source 1..20: mol_type = other RNA
cttgatggttcaagtggtgg

SEQ ID NO: 20991 - RNA, 20 nt, synthetic construct
  source 1..20: mol_type = other RNA
gagtacatggtccctatgcg

SEQ ID NO: 20992 - RNA, 20 nt, synthetic construct
  source 1..20: mol_type = other RNA
aggcgcggcaataccgtaaa

SEQ ID NO: 20993 - RNA, 20 nt, synthetic construct
  source 1..20: mol_type = other RNA
ggcgcggcaataccgtaaat

SEQ ID NO: 20994 - RNA, 20 nt, synthetic construct
  source 1..20: mol_type = other RNA
aataccgtaaatgggattca

SEQ ID NO: 20995 - RNA, 20 nt, synthetic construct
  source 1..20: mol_type = other RNA
gacctgaactggagacgaca

SEQ ID NO: 20996 - RNA, 20 nt, synthetic construct
  source 1..20: mol_type = other RNA
attcgcaacaacacgttgga

SEQ ID NO: 20997 - RNA, 20 nt, synthetic construct
  source 1..20: mol_type = other RNA
cgtacatgagtaaatgacga

SEQ ID NO: 20998 - RNA, 20 nt, synthetic construct
  source 1..20: mol_type = other RNA
catgagtaaatgacgatggt

SEQ ID NO: 20999 - RNA, 20 nt, synthetic construct
  source 1..20: mol_type = other RNA
atgagtaaatgacgatggtt

SEQ ID NO: 21000 - RNA, 20 nt, synthetic construct
  source 1..20: mol_type = other RNA
tcctatagaggacgacacga

SEQ ID NO: 21001 - RNA, 20 nt, synthetic construct
  source 1..20: mol_type = other RNA
gaggacgacacgatggtgta

SEQ ID NO: 21002 - RNA, 20 nt, synthetic construct
  source 1..20: mol_type = other RNA
aggacgacacgatggtgtat

SEQ ID NO: 21003 - RNA, 20 nt, synthetic construct
  source 1..20: mol_type = other RNA
ggtattagtactgcgtctaa

SEQ ID NO: 21004 - RNA, 20 nt, synthetic construct
  source 1..20: mol_type = other RNA
tagatatatgcgaataatga

SEQ ID NO: 21005 - RNA, 20 nt, synthetic construct
  source 1..20: mol_type = other RNA
gaggattgttcagcctctac

SEQ ID NO: 21006 - RNA, 20 nt, synthetic construct
  source 1..20: mol_type = other RNA
ttcgcgctaaagatctcctg

SEQ ID NO: 21007 - RNA, 20 nt, synthetic construct
  source 1..20: mol_type = other RNA
ccgcacaattcccgacttgt

SEQ ID NO: 21008 - RNA, 20 nt, synthetic construct
  source 1..20: mol_type = other RNA
cccggccacggaccggtggt

SEQ ID NO: 21009 - RNA, 20 nt, synthetic construct
  source 1..20: mol_type = other RNA
tccagcatatattgcgtcaa

SEQ ID NO: 21010 - RNA, 20 nt, synthetic construct
  source 1..20: mol_type = other RNA
ttgcgtcaagggttctgata

SEQ ID NO: 21011 - RNA, 20 nt, synthetic construct
  source 1..20: mol_type = other RNA
ctgatacggactgcgccgcc

SEQ ID NO: 21012 - RNA, 20 nt, synthetic construct
  source 1..20: mol_type = other RNA
gagtatattgtagccttatg

SEQ ID NO: 21013 - RNA, 20 nt, synthetic construct
  source 1..20: mol_type = other RNA
attgtagccttatgaggtcc

SEQ ID NO: 21014 - RNA, 20 nt, synthetic construct
  source 1..20: mol_type = other RNA
gatggcactcatctgctcgc

SEQ ID NO: 21015 - RNA, 20 nt, synthetic construct
  source 1..20: mol_type = other RNA
atgttgttaataaacacgta

SEQ ID NO: 21016 - RNA, 20 nt, synthetic construct
  source 1..20: mol_type = other RNA
gtcgaagggaagcacgccac

SEQ ID NO: 21017 - RNA, 20 nt, synthetic construct
  source 1..20: mol_type = other RNA
ttcctggtccgacagcatga

SEQ ID NO: 21018 - RNA, 20 nt, synthetic construct
  source 1..20: mol_type = other RNA
ctgcacaagacgagtatcga

SEQ ID NO: 21019 - RNA, 20 nt, synthetic construct
  source 1..20: mol_type = other RNA
gagtatcgatggaaacccgt

SEQ ID NO: 21020 - RNA, 20 nt, synthetic construct
  source 1..20: mol_type = other RNA
tcggtaataatccacaatac

SEQ ID NO: 21021 - RNA, 20 nt, synthetic construct
  source 1..20: mol_type = other RNA
gctgttgcagatgaacccgt

SEQ ID NO: 21022 - RNA, 20 nt, synthetic construct
  source 1..20: mol_type = other RNA
acccgtaggcctgcgcctcc

SEQ ID NO: 21023 - RNA, 20 nt, synthetic construct
  source 1..20: mol_type = other RNA
gtacaccagggtcctgccga

SEQ ID NO: 21024 - RNA, 20 nt, synthetic construct
  source 1..20: mol_type = other RNA
cgccatgatgtgaatcatat

SEQ ID NO: 21025 - RNA, 20 nt, synthetic construct
  source 1..20: mol_type = other RNA
ccatgatgtgaatcatattg

SEQ ID NO: 21026 - RNA, 20 nt, synthetic construct
  source 1..20: mol_type = other RNA
cgtagaagtcatgcgttgtc

SEQ ID NO: 21027 - RNA, 20 nt, synthetic construct
  source 1..20: mol_type = other RNA
tcatgcgttgtcaggcctat

SEQ ID NO: 21028 - RNA, 20 nt, synthetic construct
  source 1..20: mol_type = other RNA
tgcgttgtcaggcctatagg

SEQ ID NO: 21029 - RNA, 20 nt, synthetic construct
  source 1..20: mol_type = other RNA
ggccgtggacactgtgaatc

SEQ ID NO: 21030 - RNA, 20 nt, synthetic construct
  source 1..20: mol_type = other RNA
cggcgttgcgcacgtagttc

SEQ ID NO: 21031 - RNA, 20 nt, synthetic construct
  source 1..20: mol_type = other RNA
ggcgttgcgcacgtagttca

SEQ ID NO: 21032 - RNA, 20 nt, synthetic construct
  source 1..20: mol_type = other RNA
cgtagttcagggcgagctgc

SEQ ID NO: 21033 - RNA, 20 nt, synthetic construct
  source 1..20: mol_type = other RNA
gtagttcagggcgagctgct

SEQ ID NO: 21034 - RNA, 20 nt, synthetic construct
  source 1..20: mol_type = other RNA
gcccatatctacgcgaaata

SEQ ID NO: 21035 - RNA, 20 nt, synthetic construct
  source 1..20: mol_type = other RNA
aataaggtgatagattccac

SEQ ID NO: 21036 - RNA, 20 nt, synthetic construct
  source 1..20: mol_type = other RNA
aaggtgatagattccaccgg

SEQ ID NO: 21037 - RNA, 20 nt, synthetic construct
  source 1..20: mol_type = other RNA
accggaggagcccgctccga

SEQ ID NO: 21038 - RNA, 20 nt, synthetic construct
  source 1..20: mol_type = other RNA
ctgcttgttataatgcatgt

SEQ ID NO: 21039 - RNA, 20 nt, synthetic construct
  source 1..20: mol_type = other RNA
tgcttgttataatgcatgta

SEQ ID NO: 21040 - RNA, 20 nt, synthetic construct
  source 1..20: mol_type = other RNA
atacacttctgagtaccatg

SEQ ID NO: 21041 - RNA, 20 nt, synthetic construct
  source 1..20: mol_type = other RNA
tacacttctgagtaccatgt

SEQ ID NO: 21042 - RNA, 20 nt, synthetic construct
  source 1..20: mol_type = other RNA
acacttctgagtaccatgtg

SEQ ID NO: 21043 - RNA, 20 nt, synthetic construct
  source 1..20: mol_type = other RNA
gggctcgttgataattgatg

SEQ ID NO: 21044 - RNA, 20 nt, synthetic construct
  source 1..20: mol_type = other RNA
ggctcgttgataattgatgg

SEQ ID NO: 21045 - RNA, 20 nt, synthetic construct
  source 1..20: mol_type = other RNA
atcctgcacctgcccattaa

SEQ ID NO: 21046 - RNA, 20 nt, synthetic construct
  source 1..20: mol_type = other RNA
aacgggacccgaactcttcg

SEQ ID NO: 21047 - RNA, 20 nt, synthetic construct
  source 1..20: mol_type = other RNA
aaagtagttcggcctcaacg

SEQ ID NO: 21048 - RNA, 20 nt, synthetic construct
  source 1..20: mol_type = other RNA
aacgcggctcatgacgctcc

SEQ ID NO: 21049 - RNA, 20 nt, synthetic construct
  source 1..20: mol_type = other RNA
acgcggctcatgacgctcca

SEQ ID NO: 21050 - RNA, 20 nt, synthetic construct
  source 1..20: mol_type = other RNA
atcaaagtccgcattatacc

SEQ ID NO: 21051 - RNA, 20 nt, synthetic construct
  source 1..20: mol_type = other RNA
atgctgcttcgttcgagaga

SEQ ID NO: 21052 - RNA, 20 nt, synthetic construct
  source 1..20: mol_type = other RNA
cgtcgccagtgacgacatca

SEQ ID NO: 21053 - RNA, 20 nt, synthetic construct
  source 1..20: mol_type = other RNA
cagtgacgacatcacggtaa

SEQ ID NO: 21054 - RNA, 20 nt, synthetic construct
  source 1..20: mol_type = other RNA
gagaccctcaatatcgtgaa

SEQ ID NO: 21055 - RNA, 20 nt, synthetic construct
  source 1..20: mol_type = other RNA
aacttgcagcgttcgtgcaa

SEQ ID NO: 21056 - RNA, 20 nt, synthetic construct
  source 1..20: mol_type = other RNA
cagcgttcgtgcaaaggaaa

SEQ ID NO: 21057 - RNA, 20 nt, synthetic construct
  source 1..20: mol_type = other RNA
tgggatagccaacctcgtcc

SEQ ID NO: 21058 - RNA, 20 nt, synthetic construct
  source 1..20: mol_type = other RNA
agccaacctcgtccaggtga

SEQ ID NO: 21059 - RNA, 20 nt, synthetic construct
  source 1..20: mol_type = other RNA
aaggtctgagttcccgcaga

SEQ ID NO: 21060 - RNA, 20 nt, synthetic construct
  source 1..20: mol_type = other RNA
accggctgatcgaccatacc

SEQ ID NO: 21061 - RNA, 20 nt, synthetic construct
  source 1..20: mol_type = other RNA
accatacctggctgcccagt

SEQ ID NO: 21062 - RNA, 20 nt, synthetic construct
  source 1..20: mol_type = other RNA
cgaattcttccctccttgcg

SEQ ID NO: 21063 - RNA, 20 nt, synthetic construct
  source 1..20: mol_type = other RNA
ggaagtcttcgcatgataga

SEQ ID NO: 21064 - RNA, 20 nt, synthetic construct
  source 1..20: mol_type = other RNA
cttcgcatgatagagggagc

SEQ ID NO: 21065 - RNA, 20 nt, synthetic construct
  source 1..20: mol_type = other RNA
ttcgcatgatagagggagcg

SEQ ID NO: 21066 - RNA, 20 nt, synthetic construct
  source 1..20: mol_type = other RNA
gatgccaggtcgtatgctga

SEQ ID NO: 21067 - RNA, 20 nt, synthetic construct
  source 1..20: mol_type = other RNA
atgccaggtcgtatgctgat

SEQ ID NO: 21068 - RNA, 20 nt, synthetic construct
  source 1..20: mol_type = other RNA
gccaggtcgtatgctgatgg

SEQ ID NO: 21069 - RNA, 20 nt, synthetic construct
  source 1..20: mol_type = other RNA
ccaggtcgtatgctgatggg

SEQ ID NO: 21070 - RNA, 20 nt, synthetic construct
  source 1..20: mol_type = other RNA
atgaagagcggctgaagcac

SEQ ID NO: 21071 - RNA, 20 nt, synthetic construct
  source 1..20: mol_type = other RNA
gcatgcatctgcagtatccc

SEQ ID NO: 21072 - RNA, 20 nt, synthetic construct
  source 1..20: mol_type = other RNA
catgcatctgcagtatccca

SEQ ID NO: 21073 - RNA, 20 nt, synthetic construct
  source 1..20: mol_type = other RNA
gtcccatacattgcttgcgc

SEQ ID NO: 21074 - RNA, 20 nt, synthetic construct
  source 1..20: mol_type = other RNA
accggcaatattgaactgaa

SEQ ID NO: 21075 - RNA, 20 nt, synthetic construct
  source 1..20: mol_type = other RNA
ggcaatattgaactgaacgg

SEQ ID NO: 21076 - RNA, 20 nt, synthetic construct
  source 1..20: mol_type = other RNA
cctaccgcacgggcctgaag

SEQ ID NO: 21077 - RNA, 20 nt, synthetic construct
  source 1..20: mol_type = other RNA
tccgcgtacgtcaaatgctt

SEQ ID NO: 21078 - RNA, 20 nt, synthetic construct
  source 1..20: mol_type = other RNA
gcttggcaagatgcgctgag

SEQ ID NO: 21079 - RNA, 20 nt, synthetic construct
  source 1..20: mol_type = other RNA
gagtggtagttgttgtatcc

SEQ ID NO: 21080 - RNA, 20 nt, synthetic construct
  source 1..20: mol_type = other RNA
gttgttgtatcccggctcat

SEQ ID NO: 21081 - RNA, 20 nt, synthetic construct
  source 1..20: mol_type = other RNA
tcccggctcatagggcccat

SEQ ID NO: 21082 - RNA, 20 nt, synthetic construct
  source 1..20: mol_type = other RNA
cccattggcattgcgtacga

SEQ ID NO: 21083 - RNA, 20 nt, synthetic construct
  source 1..20: mol_type = other RNA
taaactgcgccttaagccta

SEQ ID NO: 21084 - RNA, 20 nt, synthetic construct
  source 1..20: mol_type = other RNA
aaactgcgccttaagcctaa

SEQ ID NO: 21085 - RNA, 20 nt, synthetic construct
  source 1..20: mol_type = other RNA
attgcgcttgcgctgcacga

SEQ ID NO: 21086 - RNA, 20 nt, synthetic construct
  source 1..20: mol_type = other RNA
tgcctggtggactaccgttg

SEQ ID NO: 21087 - RNA, 20 nt, synthetic construct
  source 1..20: mol_type = other RNA
tctgggctgtaaggtctcgc

SEQ ID NO: 21088 - RNA, 20 nt, synthetic construct
  source 1..20: mol_type = other RNA
tggactcctccgttctcgtt

SEQ ID NO: 21089 - RNA, 20 nt, synthetic construct
  source 1..20: mol_type = other RNA
aaagcccgaatccctaacgg

SEQ ID NO: 21090 - RNA, 20 nt, synthetic construct
  source 1..20: mol_type = other RNA
aatgctaacagcctaccacc

SEQ ID NO: 21091 - RNA, 20 nt, synthetic construct
  source 1..20: mol_type = other RNA
cttcttgctcgtattaagag

SEQ ID NO: 21092 - RNA, 20 nt, synthetic construct
  source 1..20: mol_type = other RNA
ctcgtattaagagcgggaag

SEQ ID NO: 21093 - RNA, 20 nt, synthetic construct
  source 1..20: mol_type = other RNA
tcgtattaagagcgggaagt

SEQ ID NO: 21094 - RNA, 20 nt, synthetic construct
  source 1..20: mol_type = other RNA
gcccgttggctactatgtaa

SEQ ID NO: 21095 - RNA, 20 nt, synthetic construct
  source 1..20: mol_type = other RNA
tagaggcatcgccgtcattc

SEQ ID NO: 21096 - RNA, 20 nt, synthetic construct
  source 1..20: mol_type = other RNA
gcagaccagctatacagcct

SEQ ID NO: 21097 - RNA, 20 nt, synthetic construct
  source 1..20: mol_type = other RNA
ctatacagcctaggtaccac

SEQ ID NO: 21098 - RNA, 20 nt, synthetic construct
  source 1..20: mol_type = other RNA
gggcaatctgttgacgcaac

SEQ ID NO: 21099 - RNA, 20 nt, synthetic construct
  source 1..20: mol_type = other RNA
ggcaatctgttgacgcaaca

SEQ ID NO: 21100 - RNA, 20 nt, synthetic construct
  source 1..20: mol_type = other RNA
gcaatctgttgacgcaacag

SEQ ID NO: 21101 - RNA, 20 nt, synthetic construct
  source 1..20: mol_type = other RNA
ttagcgctaaattggtgtcc

SEQ ID NO: 21102 - RNA, 20 nt, synthetic construct
  source 1..20: mol_type = other RNA
gagaaattaattacgtcaga

SEQ ID NO: 21103 - RNA, 20 nt, synthetic construct
  source 1..20: mol_type = other RNA
caatcctgggttatcgatct

SEQ ID NO: 21104 - RNA, 20 nt, synthetic construct
  source 1..20: mol_type = other RNA
tgggttatcgatcttggaat

SEQ ID NO: 21105 - RNA, 20 nt, synthetic construct
  source 1..20: mol_type = other RNA
ctaggacgttacctggacgc

SEQ ID NO: 21106 - RNA, 20 nt, synthetic construct
  source 1..20: mol_type = other RNA
taggacgttacctggacgca

SEQ ID NO: 21107 - RNA, 20 nt, synthetic construct
  source 1..20: mol_type = other RNA
aggacgttacctggacgcag

SEQ ID NO: 21108 - RNA, 20 nt, synthetic construct
  source 1..20: mol_type = other RNA
gcatcttgttggaatcgata

SEQ ID NO: 21109 - RNA, 20 nt, synthetic construct
  source 1..20: mol_type = other RNA
taaggaccaaaccgcgctcg

SEQ ID NO: 21110 - RNA, 20 nt, synthetic construct
  source 1..20: mol_type = other RNA
agacctcgcagagcctgcga

SEQ ID NO: 21111 - RNA, 20 nt, synthetic construct
  source 1..20: mol_type = other RNA
tgcgaaggaaatcagcgaaa

SEQ ID NO: 21112 - RNA, 20 nt, synthetic construct
  source 1..20: mol_type = other RNA
gccataagcttcttcagccg

SEQ ID NO: 21113 - RNA, 20 nt, synthetic construct
  source 1..20: mol_type = other RNA
ccataagcttcttcagccgg

SEQ ID NO: 21114 - RNA, 20 nt, synthetic construct
  source 1..20: mol_type = other RNA
cataagcttcttcagccggg

SEQ ID NO: 21115 - RNA, 20 nt, synthetic construct
  source 1..20: mol_type = other RNA
taccaccatgttgggagaac

SEQ ID NO: 21116 - RNA, 20 nt, synthetic construct
  source 1..20: mol_type = other RNA
tactcgataaatgctaatca

SEQ ID NO: 21117 - RNA, 20 nt, synthetic construct
  source 1..20: mol_type = other RNA
accgcatgtggtatcatatt

SEQ ID NO: 21118 - RNA, 20 nt, synthetic construct
  source 1..20: mol_type = other RNA
aattcctaagggtaagccga

SEQ ID NO: 21119 - RNA, 20 nt, synthetic construct
  source 1..20: mol_type = other RNA
tgcaatgttatgtaagtcgt

SEQ ID NO: 21120 - RNA, 20 nt, synthetic construct
  source 1..20: mol_type = other RNA
gtgaggataacatgttcttc

SEQ ID NO: 21121 - RNA, 20 nt, synthetic construct
  source 1..20: mol_type = other RNA
ttcttcaggttcgtcgtcac

SEQ ID NO: 21122 - RNA, 20 nt, synthetic construct
  source 1..20: mol_type = other RNA
cgtgtctaaataggcctgca

SEQ ID NO: 21123 - RNA, 20 nt, synthetic construct
  source 1..20: mol_type = other RNA
atggccttgcgtattaaatg

SEQ ID NO: 21124 - RNA, 20 nt, synthetic construct
  source 1..20: mol_type = other RNA
tgatcttgttgatacgccaa

SEQ ID NO: 21125 - RNA, 20 nt, synthetic construct
  source 1..20: mol_type = other RNA
ttgttgatacgccaatggcg

SEQ ID NO: 21126 - RNA, 20 nt, synthetic construct
  source 1..20: mol_type = other RNA
acgccaatggcgaggactta

SEQ ID NO: 21127 - RNA, 20 nt, synthetic construct
  source 1..20: mol_type = other RNA
ggcgaggacttaaggagatt

SEQ ID NO: 21128 - RNA, 20 nt, synthetic construct
  source 1..20: mol_type = other RNA
gcgaggacttaaggagattc

SEQ ID NO: 21129 - RNA, 20 nt, synthetic construct
  source 1..20: mol_type = other RNA
gaggacttaaggagattcgg

SEQ ID NO: 21130 - RNA, 20 nt, synthetic construct
  source 1..20: mol_type = other RNA
ctcatccgagcttatagagt

SEQ ID NO: 21131 - RNA, 20 nt, synthetic construct
  source 1..20: mol_type = other RNA
ctgctgttagcaagctgtac

SEQ ID NO: 21132 - RNA, 20 nt, synthetic construct
  source 1..20: mol_type = other RNA
aacggccgctattaaatcaa

SEQ ID NO: 21133 - RNA, 20 nt, synthetic construct
  source 1..20: mol_type = other RNA
tcgcgaggtaataagtcgca

SEQ ID NO: 21134 - RNA, 20 nt, synthetic construct
  source 1..20: mol_type = other RNA
aagtcgcacggagtcctccg

SEQ ID NO: 21135 - RNA, 20 nt, synthetic construct
  source 1..20: mol_type = other RNA
catcgtatagtgaaatgaag

SEQ ID NO: 21136 - RNA, 20 nt, synthetic construct
  source 1..20: mol_type = other RNA
atcgtatagtgaaatgaagc

SEQ ID NO: 21137 - RNA, 20 nt, synthetic construct
  source 1..20: mol_type = other RNA
tggatgagtacctgctccat

SEQ ID NO: 21138 - RNA, 20 nt, synthetic construct
  source 1..20: mol_type = other RNA
caatacttgaaagggttctt

SEQ ID NO: 21139 - RNA, 20 nt, synthetic construct
  source 1..20: mol_type = other RNA
ctgcgagtgttcgaggtatt

SEQ ID NO: 21140 - RNA, 20 nt, synthetic construct
  source 1..20: mol_type = other RNA
aatacggatgctgtgcatcg

SEQ ID NO: 21141 - RNA, 20 nt, synthetic construct
  source 1..20: mol_type = other RNA
atacggatgctgtgcatcgc

SEQ ID NO: 21142 - RNA, 20 nt, synthetic construct
  source 1..20: mol_type = other RNA
gcagcgacgtacaaatgctc

SEQ ID NO: 21143 - RNA, 20 nt, synthetic construct
  source 1..20: mol_type = other RNA
ggtaattccctgtatgagct

SEQ ID NO: 21144 - RNA, 20 nt, synthetic construct
  source 1..20: mol_type = other RNA
gtaattccctgtatgagctt

SEQ ID NO: 21145 - RNA, 20 nt, synthetic construct
  source 1..20: mol_type = other RNA
tagctcggagtacgtccaca

SEQ ID NO: 21146 - RNA, 20 nt, synthetic construct
  source 1..20: mol_type = other RNA
agctcggagtacgtccacac

SEQ ID NO: 21147 - RNA, 20 nt, synthetic construct
  source 1..20: mol_type = other RNA
gctcggagtacgtccacacg

SEQ ID NO: 21148 - RNA, 20 nt, synthetic construct
  source 1..20: mol_type = other RNA
cccgtatccataggcctcaa

SEQ ID NO: 21149 - RNA, 20 nt, synthetic construct
  source 1..20: mol_type = other RNA
cataggcctcaaaggtattg

SEQ ID NO: 21150 - RNA, 20 nt, synthetic construct
  source 1..20: mol_type = other RNA
ctcaaaggtattgaggacgg

SEQ ID NO: 21151 - RNA, 20 nt, synthetic construct
  source 1..20: mol_type = other RNA
ccggcgtgatggatggacta

SEQ ID NO: 21152 - RNA, 20 nt, synthetic construct
  source 1..20: mol_type = other RNA
cggcgtgatggatggactaa

SEQ ID NO: 21153 - RNA, 20 nt, synthetic construct
  source 1..20: mol_type = other RNA
ggcgtgatggatggactaag

SEQ ID NO: 21154 - RNA, 20 nt, synthetic construct
  source 1..20: mol_type = other RNA
ctggttggtgaacccatcaa

SEQ ID NO: 21155 - RNA, 20 nt, synthetic construct
  source 1..20: mol_type = other RNA
tgtgcgtacttagcaagctc

SEQ ID NO: 21156 - RNA, 20 nt, synthetic construct
  source 1..20: mol_type = other RNA
gattgtcacgttgcgctcac

SEQ ID NO: 21157 - RNA, 20 nt, synthetic construct
  source 1..20: mol_type = other RNA
attgtcacgttgcgctcact

SEQ ID NO: 21158 - RNA, 20 nt, synthetic construct
  source 1..20: mol_type = other RNA
ttgtcacgttgcgctcactg

SEQ ID NO: 21159 - RNA, 20 nt, synthetic construct
  source 1..20: mol_type = other RNA
tgtcacgttgcgctcactgg

SEQ ID NO: 21160 - RNA, 20 nt, synthetic construct
  source 1..20: mol_type = other RNA
gtcacgttgcgctcactggg

SEQ ID NO: 21161 - RNA, 20 nt, synthetic construct
  source 1..20: mol_type = other RNA
cataatcatctcgtaccgca

SEQ ID NO: 21162 - RNA, 20 nt, synthetic construct
  source 1..20: mol_type = other RNA
acccgatgagaatacgcagc

SEQ ID NO: 21163 - RNA, 20 nt, synthetic construct
  source 1..20: mol_type = other RNA
cgatgagaatacgcagctgg

SEQ ID NO: 21164 - RNA, 20 nt, synthetic construct
  source 1..20: mol_type = other RNA
tacgcagctggtggccttcc

SEQ ID NO: 21165 - RNA, 20 nt, synthetic construct
  source 1..20: mol_type = other RNA
caggcttcgttcgcgtacag

SEQ ID NO: 21166 - RNA, 20 nt, synthetic construct
  source 1..20: mol_type = other RNA
aggcttcgttcgcgtacagc

SEQ ID NO: 21167 - RNA, 20 nt, synthetic construct
  source 1..20: mol_type = other RNA
tgcagaatggtgaaccgtac

SEQ ID NO: 21168 - RNA, 20 nt, synthetic construct
  source 1..20: mol_type = other RNA
accgtactggaataaactga

SEQ ID NO: 21169 - RNA, 20 nt, synthetic construct
  source 1..20: mol_type = other RNA
tgtgtgctcatcgcgaatcg

SEQ ID NO: 21170 - RNA, 20 nt, synthetic construct
  source 1..20: mol_type = other RNA
atcgcgaatcgcggcgcaga

SEQ ID NO: 21171 - RNA, 20 nt, synthetic construct
  source 1..20: mol_type = other RNA
agcagcgggtcgttcccaca

SEQ ID NO: 21172 - RNA, 20 nt, synthetic construct
  source 1..20: mol_type = other RNA
gcagcgggtcgttcccacag

SEQ ID NO: 21173 - RNA, 20 nt, synthetic construct
  source 1..20: mol_type = other RNA
ccgacatgcggacccgattg

SEQ ID NO: 21174 - RNA, 20 nt, synthetic construct
  source 1..20: mol_type = other RNA
gccaatcccgagatgtgcgt

SEQ ID NO: 21175 - RNA, 20 nt, synthetic construct
  source 1..20: mol_type = other RNA
aatcccgagatgtgcgttgg

SEQ ID NO: 21176 - RNA, 20 nt, synthetic construct
  source 1..20: mol_type = other RNA
gctgccactcacattaaagg

SEQ ID NO: 21177 - RNA, 20 nt, synthetic construct
  source 1..20: mol_type = other RNA
cttgccatagaaagggcagt

SEQ ID NO: 21178 - RNA, 20 nt, synthetic construct
  source 1..20: mol_type = other RNA
ttaaacaggccgtaagcctt

SEQ ID NO: 21179 - RNA, 20 nt, synthetic construct
  source 1..20: mol_type = other RNA
tcaagctgatactcagacat

SEQ ID NO: 21180 - RNA, 20 nt, synthetic construct
  source 1..20: mol_type = other RNA
caagctgatactcagacatg

SEQ ID NO: 21181 - RNA, 20 nt, synthetic construct
  source 1..20: mol_type = other RNA
cattcgatgaaatgtaagta

SEQ ID NO: 21182 - RNA, 20 nt, synthetic construct
  source 1..20: mol_type = other RNA
aaacagttgctggcgctgga

SEQ ID NO: 21183 - RNA, 20 nt, synthetic construct
  source 1..20: mol_type = other RNA
aacagttgctggcgctggag

SEQ ID NO: 21184 - RNA, 20 nt, synthetic construct
  source 1..20: mol_type = other RNA
ccgttgggcagctcatgccg

SEQ ID NO: 21185 - RNA, 20 nt, synthetic construct
  source 1..20: mol_type = other RNA
gctcatgccgcggaaccaaa

SEQ ID NO: 21186 - RNA, 20 nt, synthetic construct
  source 1..20: mol_type = other RNA
gacgtattccatgacactcc

SEQ ID NO: 21187 - RNA, 20 nt, synthetic construct
  source 1..20: mol_type = other RNA
tccatgacactcccggttac

SEQ ID NO: 21188 - RNA, 20 nt, synthetic construct
  source 1..20: mol_type = other RNA
gggcgttgccgacatgaaga

SEQ ID NO: 21189 - RNA, 20 nt, synthetic construct
  source 1..20: mol_type = other RNA
cgacatgaagacggccctgg

SEQ ID NO: 21190 - RNA, 20 nt, synthetic construct
  source 1..20: mol_type = other RNA
atgccgtgattcaaccgacg

SEQ ID NO: 21191 - RNA, 20 nt, synthetic construct
  source 1..20: mol_type = other RNA
tcatgtagtggttcatgaat

SEQ ID NO: 21192 - RNA, 20 nt, synthetic construct
  source 1..20: mol_type = other RNA
gttcatgaattggcgcgcaa

SEQ ID NO: 21193 - RNA, 20 nt, synthetic construct
  source 1..20: mol_type = other RNA
agacgcgagtagggtgtgtt

SEQ ID NO: 21194 - RNA, 20 nt, synthetic construct
  source 1..20: mol_type = other RNA
atgcaattggagacccttga

SEQ ID NO: 21195 - RNA, 20 nt, synthetic construct
  source 1..20: mol_type = other RNA
aattggagacccttgatgga

SEQ ID NO: 21196 - RNA, 20 nt, synthetic construct
  source 1..20: mol_type = other RNA
agacccttgatggaaggaaa

SEQ ID NO: 21197 - RNA, 20 nt, synthetic construct
  source 1..20: mol_type = other RNA
ggaaggaaagggcgacgcgt

SEQ ID NO: 21198 - RNA, 20 nt, synthetic construct
  source 1..20: mol_type = other RNA
gaaggaaagggcgacgcgta

SEQ ID NO: 21199 - RNA, 20 nt, synthetic construct
  source 1..20: mol_type = other RNA
aaggaaagggcgacgcgtag

SEQ ID NO: 21200 - RNA, 20 nt, synthetic construct
  source 1..20: mol_type = other RNA
aaagtctgcggcatccaatt

SEQ ID NO: 21201 - RNA, 20 nt, synthetic construct
  source 1..20: mol_type = other RNA
tcagctaattgttcgtcgct

SEQ ID NO: 21202 - RNA, 20 nt, synthetic construct
  source 1..20: mol_type = other RNA
attgttcgtcgcttggaatg

SEQ ID NO: 21203 - RNA, 20 nt, synthetic construct
  source 1..20: mol_type = other RNA
ttgttcgtcgcttggaatgt

SEQ ID NO: 21204 - RNA, 20 nt, synthetic construct
  source 1..20: mol_type = other RNA
gcttggaatgtgggactgca

SEQ ID NO: 21205 - RNA, 20 nt, synthetic construct
  source 1..20: mol_type = other RNA
tcgacttgcagtcaacagac

SEQ ID NO: 21206 - RNA, 20 nt, synthetic construct
  source 1..20: mol_type = other RNA
agaccggttatagtaaacga

SEQ ID NO: 21207 - RNA, 20 nt, synthetic construct
  source 1..20: mol_type = other RNA
tagaagaatcgcagttgttc

SEQ ID NO: 21208 - RNA, 20 nt, synthetic construct
  source 1..20: mol_type = other RNA
agaagaatcgcagttgttcc

SEQ ID NO: 21209 - RNA, 20 nt, synthetic construct
  source 1..20: mol_type = other RNA
cgggatatctggcgatcgta

SEQ ID NO: 21210 - RNA, 20 nt, synthetic construct
  source 1..20: mol_type = other RNA
gggatatctggcgatcgtat

SEQ ID NO: 21211 - RNA, 20 nt, synthetic construct
  source 1..20: mol_type = other RNA
tggcgatcgtatgggctaaa

SEQ ID NO: 21212 - RNA, 20 nt, synthetic construct
  source 1..20: mol_type = other RNA
taattccctcgcgggttgac

SEQ ID NO: 21213 - RNA, 20 nt, synthetic construct
  source 1..20: mol_type = other RNA
atatcgtaagatggtgctgt

SEQ ID NO: 21214 - RNA, 20 nt, synthetic construct
  source 1..20: mol_type = other RNA
gttcaaatggtacttaatac

SEQ ID NO: 21215 - RNA, 20 nt, synthetic construct
  source 1..20: mol_type = other RNA
aacgcggagacgctgaatca

SEQ ID NO: 21216 - RNA, 20 nt, synthetic construct
  source 1..20: mol_type = other RNA
aatggcaagtacgttcacca

SEQ ID NO: 21217 - RNA, 20 nt, synthetic construct
  source 1..20: mol_type = other RNA
ggcaagtacgttcaccacgg

SEQ ID NO: 21218 - RNA, 20 nt, synthetic construct
  source 1..20: mol_type = other RNA
tagatataatcgtcgagcag

SEQ ID NO: 21219 - RNA, 20 nt, synthetic construct
  source 1..20: mol_type = other RNA
agatataatcgtcgagcagc

SEQ ID NO: 21220 - RNA, 20 nt, synthetic construct
  source 1..20: mol_type = other RNA
gttctgcattaacattccca

SEQ ID NO: 21221 - RNA, 20 nt, synthetic construct
  source 1..20: mol_type = other RNA
tcgcgaatatctgcagccgc

SEQ ID NO: 21222 - RNA, 20 nt, synthetic construct
  source 1..20: mol_type = other RNA
tcatacgtctccatgggaga

SEQ ID NO: 21223 - RNA, 20 nt, synthetic construct
  source 1..20: mol_type = other RNA
cgtctccatgggagatggcg

SEQ ID NO: 21224 - RNA, 20 nt, synthetic construct
  source 1..20: mol_type = other RNA
gcaagcgggagcatggactc

SEQ ID NO: 21225 - RNA, 20 nt, synthetic construct
  source 1..20: mol_type = other RNA
agcgggagcatggactctgg

SEQ ID NO: 21226 - RNA, 20 nt, synthetic construct
  source 1..20: mol_type = other RNA
tggagggtggatatccgtat

SEQ ID NO: 21227 - RNA, 20 nt, synthetic construct
  source 1..20: mol_type = other RNA
acgtagatgcccatagagat

SEQ ID NO: 21228 - RNA, 20 nt, synthetic construct
  source 1..20: mol_type = other RNA
ccatagagataggcggtgaa

SEQ ID NO: 21229 - RNA, 20 nt, synthetic construct
  source 1..20: mol_type = other RNA
catagagataggcggtgaaa

SEQ ID NO: 21230 - RNA, 20 nt, synthetic construct
  source 1..20: mol_type = other RNA
agataggcggtgaaagggca

SEQ ID NO: 21231 - RNA, 20 nt, synthetic construct
  source 1..20: mol_type = other RNA
gttgagtgtatcccagcgtt

SEQ ID NO: 21232 - RNA, 20 nt, synthetic construct
  source 1..20: mol_type = other RNA
aatattgtcacctatgacgg

SEQ ID NO: 21233 - RNA, 20 nt, synthetic construct
  source 1..20: mol_type = other RNA
tgtcacctatgacggtggtt

SEQ ID NO: 21234 - RNA, 20 nt, synthetic construct
  source 1..20: mol_type = other RNA
agtgcgacgaatagcatgcc

SEQ ID NO: 21235 - RNA, 20 nt, synthetic construct
  source 1..20: mol_type = other RNA
acgaatagcatgccaggcat

SEQ ID NO: 21236 - RNA, 20 nt, synthetic construct
  source 1..20: mol_type = other RNA
tgtgtgccagatcttcaaga

SEQ ID NO: 21237 - RNA, 20 nt, synthetic construct
  source 1..20: mol_type = other RNA
aatgctgacgacgatatcct

SEQ ID NO: 21238 - RNA, 20 nt, synthetic construct
  source 1..20: mol_type = other RNA
atgctgacgacgatatcctc

SEQ ID NO: 21239 - RNA, 20 nt, synthetic construct
  source 1..20: mol_type = other RNA
ggcatgatgtattcgcagtg

SEQ ID NO: 21240 - RNA, 20 nt, synthetic construct
  source 1..20: mol_type = other RNA
agagacactcggttgcgatt

SEQ ID NO: 21241 - RNA, 20 nt, synthetic construct
  source 1..20: mol_type = other RNA
gaaggcctatgcgcaacaaa

SEQ ID NO: 21242 - RNA, 20 nt, synthetic construct
  source 1..20: mol_type = other RNA
atatcgatgaaacgctgcag

SEQ ID NO: 21243 - RNA, 20 nt, synthetic construct
  source 1..20: mol_type = other RNA
cgatgaaacgctgcagaggt

SEQ ID NO: 21244 - RNA, 20 nt, synthetic construct
  source 1..20: mol_type = other RNA
aagcgtccttgtaacacctt

SEQ ID NO: 21245 - RNA, 20 nt, synthetic construct
  source 1..20: mol_type = other RNA
aggtcccgttattcgctgga

SEQ ID NO: 21246 - RNA, 20 nt, synthetic construct
  source 1..20: mol_type = other RNA
ccgttattcgctggatggaa

SEQ ID NO: 21247 - RNA, 20 nt, synthetic construct
  source 1..20: mol_type = other RNA
cgttattcgctggatggaac

SEQ ID NO: 21248 - RNA, 20 nt, synthetic construct
  source 1..20: mol_type = other RNA
cagcggtcgcagaccgagtg

SEQ ID NO: 21249 - RNA, 20 nt, synthetic construct
  source 1..20: mol_type = other RNA
cgagctcatcgtaaatgcca

SEQ ID NO: 21250 - RNA, 20 nt, synthetic construct
  source 1..20: mol_type = other RNA
gcgcgatgtgtatgttcccg

SEQ ID NO: 21251 - RNA, 20 nt, synthetic construct
  source 1..20: mol_type = other RNA
cgatgtgtatgttcccgagg

SEQ ID NO: 21252 - RNA, 20 nt, synthetic construct
  source 1..20: mol_type = other RNA
agccggaacgaacatcaata

SEQ ID NO: 21253 - RNA, 20 nt, synthetic construct
  source 1..20: mol_type = other RNA
cgtcgggctgaagctcgcca

SEQ ID NO: 21254 - RNA, 20 nt, synthetic construct
  source 1..20: mol_type = other RNA
tcgccatggtgcattcgcag

SEQ ID NO: 21255 - RNA, 20 nt, synthetic construct
  source 1..20: mol_type = other RNA
cgccatggtgcattcgcagt

SEQ ID NO: 21256 - RNA, 20 nt, synthetic construct
  source 1..20: mol_type = other RNA
gccattcttaccaccgccga

SEQ ID NO: 21257 - RNA, 20 nt, synthetic construct
  source 1..20: mol_type = other RNA
ctcctaccattacaccctcc

SEQ ID NO: 21258 - RNA, 20 nt, synthetic construct
  source 1..20: mol_type = other RNA
cgagctcatgcccgtatacc

SEQ ID NO: 21259 - RNA, 20 nt, synthetic construct
  source 1..20: mol_type = other RNA
tgcccgtataccaggaacta

SEQ ID NO: 21260 - RNA, 20 nt, synthetic construct
  source 1..20: mol_type = other RNA
tcttcgcgcctgccaatgcg

SEQ ID NO: 21261 - RNA, 20 nt, synthetic construct
  source 1..20: mol_type = other RNA
ctgccaatgcgcggcctacg

SEQ ID NO: 21262 - RNA, 20 nt, synthetic construct
  source 1..20: mol_type = other RNA
tgccaatgcgcggcctacgt

SEQ ID NO: 21263 - RNA, 20 nt, synthetic construct
  source 1..20: mol_type = other RNA
tgcgcggcctacgtgggaaa

SEQ ID NO: 21264 - RNA, 20 nt, synthetic construct
  source 1..20: mol_type = other RNA
caatgataagccttgccgca

SEQ ID NO: 21265 - RNA, 20 nt, synthetic construct
  source 1..20: mol_type = other RNA
aatgataagccttgccgcac

SEQ ID NO: 21266 - RNA, 20 nt, synthetic construct
  source 1..20: mol_type = other RNA
gcctaatagcacgatacata

SEQ ID NO: 21267 - RNA, 20 nt, synthetic construct
  source 1..20: mol_type = other RNA
gatacatacggcgaccatta

SEQ ID NO: 21268 - RNA, 20 nt, synthetic construct
  source 1..20: mol_type = other RNA
ctatagcctgcaccctctgc

SEQ ID NO: 21269 - RNA, 20 nt, synthetic construct
  source 1..20: mol_type = other RNA
gaacacgtgtccattatcaa

SEQ ID NO: 21270 - RNA, 20 nt, synthetic construct
  source 1..20: mol_type = other RNA
acacgtgtccattatcaacg

SEQ ID NO: 21271 - RNA, 20 nt, synthetic construct
  source 1..20: mol_type = other RNA
gttatagtgggttccattcc

SEQ ID NO: 21272 - RNA, 20 nt, synthetic construct
  source 1..20: mol_type = other RNA
gcatagaatggaccggccag

SEQ ID NO: 21273 - RNA, 20 nt, synthetic construct
  source 1..20: mol_type = other RNA
agaatggaccggccagcgga

SEQ ID NO: 21274 - RNA, 20 nt, synthetic construct
  source 1..20: mol_type = other RNA
atatacgcgtgcccgcaatg

SEQ ID NO: 21275 - RNA, 20 nt, synthetic construct
  source 1..20: mol_type = other RNA
tatacgcgtgcccgcaatgc

SEQ ID NO: 21276 - RNA, 20 nt, synthetic construct
  source 1..20: mol_type = other RNA
acgcgtgcccgcaatgcggg

SEQ ID NO: 21277 - RNA, 20 nt, synthetic construct
  source 1..20: mol_type = other RNA
cgcgtgcccgcaatgcggga

SEQ ID NO: 21278 - RNA, 20 nt, synthetic construct
  source 1..20: mol_type = other RNA
ggactgcatgctactcgcgg

SEQ ID NO: 21279 - RNA, 20 nt, synthetic construct
  source 1..20: mol_type = other RNA
tgcatgctactcgcggcgga

SEQ ID NO: 21280 - RNA, 20 nt, synthetic construct
  source 1..20: mol_type = other RNA
gcatgctactcgcggcggaa

SEQ ID NO: 21281 - RNA, 20 nt, synthetic construct
  source 1..20: mol_type = other RNA
catgctactcgcggcggaag

SEQ ID NO: 21282 - RNA, 20 nt, synthetic construct
  source 1..20: mol_type = other RNA
ttgcgcacgggactgaccct

SEQ ID NO: 21283 - RNA, 20 nt, synthetic construct
  source 1..20: mol_type = other RNA
cttctgcggcatgatctccc

SEQ ID NO: 21284 - RNA, 20 nt, synthetic construct
  source 1..20: mol_type = other RNA
tgcggcatgatctccctggg

SEQ ID NO: 21285 - RNA, 20 nt, synthetic construct
  source 1..20: mol_type = other RNA
gcggcatgatctccctggga

SEQ ID NO: 21286 - RNA, 20 nt, synthetic construct
  source 1..20: mol_type = other RNA
acaaacattacaacggactc

SEQ ID NO: 21287 - RNA, 20 nt, synthetic construct
  source 1..20: mol_type = other RNA
gcagggaattgtgcaggtat

SEQ ID NO: 21288 - RNA, 20 nt, synthetic construct
  source 1..20: mol_type = other RNA
tgcgtgcgttgatcaagatc

SEQ ID NO: 21289 - RNA, 20 nt, synthetic construct
  source 1..20: mol_type = other RNA
gcgttgatcaagatctggat

SEQ ID NO: 21290 - RNA, 20 nt, synthetic construct
  source 1..20: mol_type = other RNA
gctgatacgtgtgtacgaaa

SEQ ID NO: 21291 - RNA, 20 nt, synthetic construct
  source 1..20: mol_type = other RNA
taccctggatgactcggcaa

SEQ ID NO: 21292 - RNA, 20 nt, synthetic construct
  source 1..20: mol_type = other RNA
acaagctggatgccatcgag

SEQ ID NO: 21293 - RNA, 20 nt, synthetic construct
  source 1..20: mol_type = other RNA
cagattcccaacttcttaga

SEQ ID NO: 21294 - RNA, 20 nt, synthetic construct
  source 1..20: mol_type = other RNA
acttcttagacggaatgacg

SEQ ID NO: 21295 - RNA, 20 nt, synthetic construct
  source 1..20: mol_type = other RNA
cttcttagacggaatgacgc

SEQ ID NO: 21296 - RNA, 20 nt, synthetic construct
  source 1..20: mol_type = other RNA
ttccaacaaccgtgaacgaa

SEQ ID NO: 21297 - RNA, 20 nt, synthetic construct
  source 1..20: mol_type = other RNA
aaagccgcccagtattaccc

SEQ ID NO: 21298 - RNA, 20 nt, synthetic construct
  source 1..20: mol_type = other RNA
ttcataggcataggaagctt

SEQ ID NO: 21299 - RNA, 20 nt, synthetic construct
  source 1..20: mol_type = other RNA
gcataggaagcttcggctcc

SEQ ID NO: 21300 - RNA, 20 nt, synthetic construct
  source 1..20: mol_type = other RNA
tgtattgccgcttgctatta

SEQ ID NO: 21301 - RNA, 20 nt, synthetic construct
  source 1..20: mol_type = other RNA
ggagtacggcgccaacccat

SEQ ID NO: 21302 - RNA, 20 nt, synthetic construct
  source 1..20: mol_type = other RNA
gtacggcgccaacccatcgg

SEQ ID NO: 21303 - RNA, 20 nt, synthetic construct
  source 1..20: mol_type = other RNA
tacggcgccaacccatcgga

SEQ ID NO: 21304 - RNA, 20 nt, synthetic construct
  source 1..20: mol_type = other RNA
gggctggaagtacaccactt

SEQ ID NO: 21305 - RNA, 20 nt, synthetic construct
  source 1..20: mol_type = other RNA
caccacttgggcccggcaac

SEQ ID NO: 21306 - RNA, 20 nt, synthetic construct
  source 1..20: mol_type = other RNA
agattactatactcccgctg

SEQ ID NO: 21307 - RNA, 20 nt, synthetic construct
  source 1..20: mol_type = other RNA
ggccaatactactacagcta

SEQ ID NO: 21308 - RNA, 20 nt, synthetic construct
  source 1..20: mol_type = other RNA
aaatagtctcaaccgtatcg

SEQ ID NO: 21309 - RNA, 20 nt, synthetic construct
  source 1..20: mol_type = other RNA
tatatgcgtggctaccttac

SEQ ID NO: 21310 - RNA, 20 nt, synthetic construct
  source 1..20: mol_type = other RNA
gcttaagctgcgcattatca

SEQ ID NO: 21311 - RNA, 20 nt, synthetic construct
  source 1..20: mol_type = other RNA
agccgcattctaagcgagca

SEQ ID NO: 21312 - RNA, 20 nt, synthetic construct
  source 1..20: mol_type = other RNA
aatgcaagctcgtcttgata

SEQ ID NO: 21313 - RNA, 20 nt, synthetic construct
  source 1..20: mol_type = other RNA
tcccggcgccagcgtatggc

SEQ ID NO: 21314 - RNA, 20 nt, synthetic construct
  source 1..20: mol_type = other RNA
atggctggaggaaattgatg

SEQ ID NO: 21315 - RNA, 20 nt, synthetic construct
  source 1..20: mol_type = other RNA
ggaaattgatgcggtggaaa

SEQ ID NO: 21316 - RNA, 20 nt, synthetic construct
  source 1..20: mol_type = other RNA
agttatcaaatcttcttgtg

SEQ ID NO: 21317 - RNA, 20 nt, synthetic construct
  source 1..20: mol_type = other RNA
tcggccaataatgatccggc

SEQ ID NO: 21318 - RNA, 20 nt, synthetic construct
  source 1..20: mol_type = other RNA
cgaacggcctgattgatatg

SEQ ID NO: 21319 - RNA, 20 nt, synthetic construct
  source 1..20: mol_type = other RNA
atatgtggcagcggcaccgc

SEQ ID NO: 21320 - RNA, 20 nt, synthetic construct
  source 1..20: mol_type = other RNA
gcggtggtgacgcgggtctg

SEQ ID NO: 21321 - RNA, 20 nt, synthetic construct
  source 1..20: mol_type = other RNA
ttgggtactgctcaatatcg

SEQ ID NO: 21322 - RNA, 20 nt, synthetic construct
  source 1..20: mol_type = other RNA
ggtactgctcaatatcgagg

SEQ ID NO: 21323 - RNA, 20 nt, synthetic construct
  source 1..20: mol_type = other RNA
gtactgctcaatatcgaggt

SEQ ID NO: 21324 - RNA, 20 nt, synthetic construct
  source 1..20: mol_type = other RNA
ctgccacctgaatgagatcg

SEQ ID NO: 21325 - RNA, 20 nt, synthetic construct
  source 1..20: mol_type = other RNA
aatgagatcgcggctataga

SEQ ID NO: 21326 - RNA, 20 nt, synthetic construct
  source 1..20: mol_type = other RNA
taaattgttccgtcataaac

SEQ ID NO: 21327 - RNA, 20 nt, synthetic construct
  source 1..20: mol_type = other RNA
ttccgtcataaacaggtccg

SEQ ID NO: 21328 - RNA, 20 nt, synthetic construct
  source 1..20: mol_type = other RNA
atcctcgatcttatacccac

SEQ ID NO: 21329 - RNA, 20 nt, synthetic construct
  source 1..20: mol_type = other RNA
tcctcgatcttatacccacc

SEQ ID NO: 21330 - RNA, 20 nt, synthetic construct
  source 1..20: mol_type = other RNA
catcttgcaagacccgcgac

SEQ ID NO: 21331 - RNA, 20 nt, synthetic construct
  source 1..20: mol_type = other RNA
ccgcgacaggccgtgcaccg

SEQ ID NO: 21332 - RNA, 20 nt, synthetic construct
  source 1..20: mol_type = other RNA
aagtccataacaacattgac

SEQ ID NO: 21333 - RNA, 20 nt, synthetic construct
  source 1..20: mol_type = other RNA
aacaacattgactgggacga

SEQ ID NO: 21334 - RNA, 20 nt, synthetic construct
  source 1..20: mol_type = other RNA
acaacattgactgggacgag

SEQ ID NO: 21335 - RNA, 20 nt, synthetic construct
  source 1..20: mol_type = other RNA
aggaatccatagatgtgcta

SEQ ID NO: 21336 - RNA, 20 nt, synthetic construct
  source 1..20: mol_type = other RNA
aaagtatgtaccgttgtggg

SEQ ID NO: 21337 - RNA, 20 nt, synthetic construct
  source 1..20: mol_type = other RNA
aagtatgtaccgttgtgggc

SEQ ID NO: 21338 - RNA, 20 nt, synthetic construct
  source 1..20: mol_type = other RNA
gcgggagcaaacccacctat

SEQ ID NO: 21339 - RNA, 20 nt, synthetic construct
  source 1..20: mol_type = other RNA
attggtatcaccacattaga

SEQ ID NO: 21340 - RNA, 20 nt, synthetic construct
  source 1..20: mol_type = other RNA
tccatgccgatgagtatgat

SEQ ID NO: 21341 - RNA, 20 nt, synthetic construct
  source 1..20: mol_type = other RNA
aagacgaattagaacagtac

SEQ ID NO: 21342 - RNA, 20 nt, synthetic construct
  source 1..20: mol_type = other RNA
ctacaacccaaccatcatta

SEQ ID NO: 21343 - RNA, 20 nt, synthetic construct
  source 1..20: mol_type = other RNA
gtacattaaagacatatcac

SEQ ID NO: 21344 - RNA, 20 nt, synthetic construct
  source 1..20: mol_type = other RNA
cgccaccaggcatcaaacga

SEQ ID NO: 21345 - RNA, 20 nt, synthetic construct
  source 1..20: mol_type = other RNA
acatattccctaccagtggc

SEQ ID NO: 21346 - RNA, 20 nt, synthetic construct
  source 1..20: mol_type = other RNA
catagcgagcccgttctcgc

SEQ ID NO: 21347 - RNA, 20 nt, synthetic construct
  source 1..20: mol_type = other RNA
atcttgaatatcttcatacg

SEQ ID NO: 21348 - RNA, 20 nt, synthetic construct
  source 1..20: mol_type = other RNA
acaacacgggcttgatataa

SEQ ID NO: 21349 - RNA, 20 nt, synthetic construct
  source 1..20: mol_type = other RNA
acacgggcttgatataaagg

SEQ ID NO: 21350 - RNA, 20 nt, synthetic construct
  source 1..20: mol_type = other RNA
tcaaggagatagacctccta

SEQ ID NO: 21351 - RNA, 20 nt, synthetic construct
  source 1..20: mol_type = other RNA
ttattccctatccctcccga

SEQ ID NO: 21352 - RNA, 20 nt, synthetic construct
  source 1..20: mol_type = other RNA
gatacagatacccagattgt

SEQ ID NO: 21353 - RNA, 20 nt, synthetic construct
  source 1..20: mol_type = other RNA
atacagatacccagattgtg

SEQ ID NO: 21354 - RNA, 20 nt, synthetic construct
  source 1..20: mol_type = other RNA
ctgcatcgtcctaaccctaa

SEQ ID NO: 21355 - RNA, 20 nt, synthetic construct
  source 1..20: mol_type = other RNA
cttatggtgcgtctaagtat

SEQ ID NO: 21356 - RNA, 20 nt, synthetic construct
  source 1..20: mol_type = other RNA
aacagcccgttaagatactg

SEQ ID NO: 21357 - RNA, 20 nt, synthetic construct
  source 1..20: mol_type = other RNA
cgaccttcacggcactgccg

SEQ ID NO: 21358 - RNA, 20 nt, synthetic construct
  source 1..20: mol_type = other RNA
tgccgagggcattcctctgg

SEQ ID NO: 21359 - RNA, 20 nt, synthetic construct
  source 1..20: mol_type = other RNA
gccgagggcattcctctgga

SEQ ID NO: 21360 - RNA, 20 nt, synthetic construct
  source 1..20: mol_type = other RNA
aaattaaatatacgctgcct

SEQ ID NO: 21361 - RNA, 20 nt, synthetic construct
  source 1..20: mol_type = other RNA
attaaatatacgctgcctag

SEQ ID NO: 21362 - RNA, 20 nt, synthetic construct
  source 1..20: mol_type = other RNA
aacaagagccgcgccaaaga

SEQ ID NO: 21363 - RNA, 20 nt, synthetic construct
  source 1..20: mol_type = other RNA
atactgcctgctagactccc

SEQ ID NO: 21364 - RNA, 20 nt, synthetic construct
  source 1..20: mol_type = other RNA
ttaaagccttatgggcaaac

SEQ ID NO: 21365 - RNA, 20 nt, synthetic construct
  source 1..20: mol_type = other RNA
caaacaggcgcaaatatcat

SEQ ID NO: 21366 - RNA, 20 nt, synthetic construct
  source 1..20: mol_type = other RNA
cgcaaatatcataggagtac

SEQ ID NO: 21367 - RNA, 20 nt, synthetic construct
  source 1..20: mol_type = other RNA
gcaataccacttcgagttca

SEQ ID NO: 21368 - RNA, 20 nt, synthetic construct
  source 1..20: mol_type = other RNA
tctactcctagttccgaaat

SEQ ID NO: 21369 - RNA, 20 nt, synthetic construct
  source 1..20: mol_type = other RNA
atgtgatacaagactcttaa

SEQ ID NO: 21370 - RNA, 20 nt, synthetic construct
  source 1..20: mol_type = other RNA
cctatcgtccacacagttaa

SEQ ID NO: 21371 - RNA, 20 nt, synthetic construct
  source 1..20: mol_type = other RNA
tgaagtagatcaacactatt

SEQ ID NO: 21372 - RNA, 20 nt, synthetic construct
  source 1..20: mol_type = other RNA
ttcgataagcttaataacac

SEQ ID NO: 21373 - RNA, 20 nt, synthetic construct
  source 1..20: mol_type = other RNA
taacaccgggagtatcttgc

SEQ ID NO: 21374 - RNA, 20 nt, synthetic construct
  source 1..20: mol_type = other RNA
aacaccgggagtatcttgca

SEQ ID NO: 21375 - RNA, 20 nt, synthetic construct
  source 1..20: mol_type = other RNA
gaaatacatgtgctgcgttg

SEQ ID NO: 21376 - RNA, 20 nt, synthetic construct
  source 1..20: mol_type = other RNA
aaacgcatattgtgcctggg

SEQ ID NO: 21377 - RNA, 20 nt, synthetic construct
  source 1..20: mol_type = other RNA
gccctcgtaggatatgctat

SEQ ID NO: 21378 - RNA, 20 nt, synthetic construct
  source 1..20: mol_type = other RNA
tacaagcggttggcagggat

SEQ ID NO: 21379 - RNA, 20 nt, synthetic construct
  source 1..20: mol_type = other RNA
gccgttgaaggcacattcaa

SEQ ID NO: 21380 - RNA, 20 nt, synthetic construct
  source 1..20: mol_type = other RNA
cctcgggcggtagcgcatcg

SEQ ID NO: 21381 - RNA, 20 nt, synthetic construct
  source 1..20: mol_type = other RNA
gcgccttcacttgatcctct

SEQ ID NO: 21382 - RNA, 20 nt, synthetic construct
  source 1..20: mol_type = other RNA
tctcgggccttatcccagta

SEQ ID NO: 21383 - RNA, 20 nt, synthetic construct
  source 1..20: mol_type = other RNA
ccttatcccagtacggctct

SEQ ID NO: 21384 - RNA, 20 nt, synthetic construct
  source 1..20: mol_type = other RNA
gcggcgaattccaaacctgc

SEQ ID NO: 21385 - RNA, 20 nt, synthetic construct
  source 1..20: mol_type = other RNA
tggaggacaggactaacgta

SEQ ID NO: 21386 - RNA, 20 nt, synthetic construct
  source 1..20: mol_type = other RNA
ggaggacaggactaacgtat

SEQ ID NO: 21387 - RNA, 20 nt, synthetic construct
  source 1..20: mol_type = other RNA
cgtatgggtcggcccatctt

SEQ ID NO: 21388 - RNA, 20 nt, synthetic construct
  source 1..20: mol_type = other RNA
acgcgaagatgctgatcata

SEQ ID NO: 21389 - RNA, 20 nt, synthetic construct
  source 1..20: mol_type = other RNA
cgcgaagatgctgatcatac

SEQ ID NO: 21390 - RNA, 20 nt, synthetic construct
  source 1..20: mol_type = other RNA
catacgggaacgcacatagt

SEQ ID NO: 21391 - RNA, 20 nt, synthetic construct
  source 1..20: mol_type = other RNA
acgggaacgcacatagtagg

SEQ ID NO: 21392 - RNA, 20 nt, synthetic construct
  source 1..20: mol_type = other RNA
actcttgctccgatcctggc

SEQ ID NO: 21393 - RNA, 20 nt, synthetic construct
  source 1..20: mol_type = other RNA
atagcttgttgagctcattc

SEQ ID NO: 21394 - RNA, 20 nt, synthetic construct
  source 1..20: mol_type = other RNA
cgtagcttatcatacccact

SEQ ID NO: 21395 - RNA, 20 nt, synthetic construct
  source 1..20: mol_type = other RNA
agcttatcatacccactagg

SEQ ID NO: 21396 - RNA, 20 nt, synthetic construct
  source 1..20: mol_type = other RNA
gcataatattattgtacagc

SEQ ID NO: 21397 - RNA, 20 nt, synthetic construct
  source 1..20: mol_type = other RNA
gacttgggtgcgatcagaat

SEQ ID NO: 21398 - RNA, 20 nt, synthetic construct
  source 1..20: mol_type = other RNA
aaagtgagatggcaagcgac

SEQ ID NO: 21399 - RNA, 20 nt, synthetic construct
  source 1..20: mol_type = other RNA
gcaagacatgactcgttata

SEQ ID NO: 21400 - RNA, 20 nt, synthetic construct
  source 1..20: mol_type = other RNA
tccggtgcctgtcgtagacc

SEQ ID NO: 21401 - RNA, 20 nt, synthetic construct
  source 1..20: mol_type = other RNA
tcgtagacctggctagaaag

SEQ ID NO: 21402 - RNA, 20 nt, synthetic construct
  source 1..20: mol_type = other RNA
cgtagacctggctagaaagc

SEQ ID NO: 21403 - RNA, 20 nt, synthetic construct
  source 1..20: mol_type = other RNA
gcctctacgcccgtagccat

SEQ ID NO: 21404 - RNA, 20 nt, synthetic construct
  source 1..20: mol_type = other RNA
gatgatgccatacggctcat

SEQ ID NO: 21405 - RNA, 20 nt, synthetic construct
  source 1..20: mol_type = other RNA
gtgaggctcagcggtatgca

SEQ ID NO: 21406 - RNA, 20 nt, synthetic construct
  source 1..20: mol_type = other RNA
acgacaagttgtatacgcga

SEQ ID NO: 21407 - RNA, 20 nt, synthetic construct
  source 1..20: mol_type = other RNA
ttccctcacgtacccggaaa

SEQ ID NO: 21408 - RNA, 20 nt, synthetic construct
  source 1..20: mol_type = other RNA
tggtgggacttacagtcctc

SEQ ID NO: 21409 - RNA, 20 nt, synthetic construct
  source 1..20: mol_type = other RNA
tcttgtccataccatcgggc

SEQ ID NO: 21410 - RNA, 20 nt, synthetic construct
  source 1..20: mol_type = other RNA
ccataccatcgggccggtcc

SEQ ID NO: 21411 - RNA, 20 nt, synthetic construct
  source 1..20: mol_type = other RNA
cataccatcgggccggtcca

SEQ ID NO: 21412 - RNA, 20 nt, synthetic construct
  source 1..20: mol_type = other RNA
ataccatcgggccggtccag

SEQ ID NO: 21413 - RNA, 20 nt, synthetic construct
  source 1..20: mol_type = other RNA
atctaacacgactagaccaa

SEQ ID NO: 21414 - RNA, 20 nt, synthetic construct
  source 1..20: mol_type = other RNA
tctaacacgactagaccaaa

SEQ ID NO: 21415 - RNA, 20 nt, synthetic construct
  source 1..20: mol_type = other RNA
actgctcaggcttcttgcgc

SEQ ID NO: 21416 - RNA, 20 nt, synthetic construct
  source 1..20: mol_type = other RNA
tattgtaagcagctacacgt

SEQ ID NO: 21417 - RNA, 20 nt, synthetic construct
  source 1..20: mol_type = other RNA
gtaagcagctacacgtaggt

SEQ ID NO: 21418 - RNA, 20 nt, synthetic construct
  source 1..20: mol_type = other RNA
taagcagctacacgtaggtg

SEQ ID NO: 21419 - RNA, 20 nt, synthetic construct
  source 1..20: mol_type = other RNA
gtgggcacgatgaccagggt

SEQ ID NO: 21420 - RNA, 20 nt, synthetic construct
  source 1..20: mol_type = other RNA
tgggcacgatgaccagggta

SEQ ID NO: 21421 - RNA, 20 nt, synthetic construct
  source 1..20: mol_type = other RNA
gggagggcccgcagcgacac

SEQ ID NO: 21422 - RNA, 20 nt, synthetic construct
  source 1..20: mol_type = other RNA
ggagggcccgcagcgacacg

SEQ ID NO: 21423 - RNA, 20 nt, synthetic construct
  source 1..20: mol_type = other RNA
aggcaatgcccgcgccgtaa

SEQ ID NO: 21424 - RNA, 20 nt, synthetic construct
  source 1..20: mol_type = other RNA
taacggtgagcgccttaaga

SEQ ID NO: 21425 - RNA, 20 nt, synthetic construct
  source 1..20: mol_type = other RNA
gcctccattctcgcactgga

SEQ ID NO: 21426 - RNA, 20 nt, synthetic construct
  source 1..20: mol_type = other RNA
cctccattctcgcactggac

SEQ ID NO: 21427 - RNA, 20 nt, synthetic construct
  source 1..20: mol_type = other RNA
actggacgggctatatgcag

SEQ ID NO: 21428 - RNA, 20 nt, synthetic construct
  source 1..20: mol_type = other RNA
cttaccagaggcgttacgag

SEQ ID NO: 21429 - RNA, 20 nt, synthetic construct
  source 1..20: mol_type = other RNA
ttaccagaggcgttacgaga

SEQ ID NO: 21430 - RNA, 20 nt, synthetic construct
  source 1..20: mol_type = other RNA
tagcgtcaccgaatgtgtga

SEQ ID NO: 21431 - RNA, 20 nt, synthetic construct
  source 1..20: mol_type = other RNA
aaatagtctctacggcttct

SEQ ID NO: 21432 - RNA, 20 nt, synthetic construct
  source 1..20: mol_type = other RNA
ggcggaagccctaatatacc

SEQ ID NO: 21433 - RNA, 20 nt, synthetic construct
  source 1..20: mol_type = other RNA
atagaacgctaacccagcaa

SEQ ID NO: 21434 - RNA, 20 nt, synthetic construct
  source 1..20: mol_type = other RNA
cagcatgtgtatctacccat

SEQ ID NO: 21435 - RNA, 20 nt, synthetic construct
  source 1..20: mol_type = other RNA
agcatgtgtatctacccata

SEQ ID NO: 21436 - RNA, 20 nt, synthetic construct
  source 1..20: mol_type = other RNA
catgtgtatctacccatagg

SEQ ID NO: 21437 - RNA, 20 nt, synthetic construct
  source 1..20: mol_type = other RNA
atgtgtatctacccataggg

SEQ ID NO: 21438 - RNA, 20 nt, synthetic construct
  source 1..20: mol_type = other RNA
tgaaggcccgaaggaactcc

SEQ ID NO: 21439 - RNA, 20 nt, synthetic construct
  source 1..20: mol_type = other RNA
ttagataccatcactcctcg

SEQ ID NO: 21440 - RNA, 20 nt, synthetic construct
  source 1..20: mol_type = other RNA
acaggttatctgcgaccata

SEQ ID NO: 21441 - RNA, 20 nt, synthetic construct
  source 1..20: mol_type = other RNA
taaacaggtgagaatacata

SEQ ID NO: 21442 - RNA, 20 nt, synthetic construct
  source 1..20: mol_type = other RNA
actcatcagttgttctgtaa

SEQ ID NO: 21443 - RNA, 20 nt, synthetic construct
  source 1..20: mol_type = other RNA
tgagtagtgactgtcgtgta

SEQ ID NO: 21444 - RNA, 20 nt, synthetic construct
  source 1..20: mol_type = other RNA
actgtcgtgtaaggctcagt

SEQ ID NO: 21445 - RNA, 20 nt, synthetic construct
  source 1..20: mol_type = other RNA
ctcagtcggatgagcactcg

SEQ ID NO: 21446 - RNA, 20 nt, synthetic construct
  source 1..20: mol_type = other RNA
ggatgagcactcgcggccgc

SEQ ID NO: 21447 - RNA, 20 nt, synthetic construct
  source 1..20: mol_type = other RNA
agcactcgcggccgcaggtg

SEQ ID NO: 21448 - RNA, 20 nt, synthetic construct
  source 1..20: mol_type = other RNA
atgactagtctgtccgtaac

SEQ ID NO: 21449 - RNA, 20 nt, synthetic construct
  source 1..20: mol_type = other RNA
tgactagtctgtccgtaact

SEQ ID NO: 21450 - RNA, 20 nt, synthetic construct
  source 1..20: mol_type = other RNA
gtaactgggttgtccgtgac

SEQ ID NO: 21451 - RNA, 20 nt, synthetic construct
  source 1..20: mol_type = other RNA
gttgccggtctgcccgtgac

SEQ ID NO: 21452 - RNA, 20 nt, synthetic construct
  source 1..20: mol_type = other RNA
cttgctgtagtcgctccagc

SEQ ID NO: 21453 - RNA, 20 nt, synthetic construct
  source 1..20: mol_type = other RNA
gcccattgctgatcttgata

SEQ ID NO: 21454 - RNA, 20 nt, synthetic construct
  source 1..20: mol_type = other RNA
aaacactcaccataatgccg

SEQ ID NO: 21455 - RNA, 20 nt, synthetic construct
  source 1..20: mol_type = other RNA
ccataatgccgcggataaac

SEQ ID NO: 21456 - RNA, 20 nt, synthetic construct
  source 1..20: mol_type = other RNA
agccgacctcgactccttgg

SEQ ID NO: 21457 - RNA, 20 nt, synthetic construct
  source 1..20: mol_type = other RNA
tcgaaataagacgctggacg

SEQ ID NO: 21458 - RNA, 20 nt, synthetic construct
  source 1..20: mol_type = other RNA
cgtggaggagagcgacagca

SEQ ID NO: 21459 - RNA, 20 nt, synthetic construct
  source 1..20: mol_type = other RNA
tatgcacccgctagaagcca

SEQ ID NO: 21460 - RNA, 20 nt, synthetic construct
  source 1..20: mol_type = other RNA
atgcacccgctagaagccat

SEQ ID NO: 21461 - RNA, 20 nt, synthetic construct
  source 1..20: mol_type = other RNA
aaccaacacggacgccgacc

SEQ ID NO: 21462 - RNA, 20 nt, synthetic construct
  source 1..20: mol_type = other RNA
caacacggacgccgacccgg

SEQ ID NO: 21463 - RNA, 20 nt, synthetic construct
  source 1..20: mol_type = other RNA
gtcgtgttcactagcgataa

SEQ ID NO: 21464 - RNA, 20 nt, synthetic construct
  source 1..20: mol_type = other RNA
gcagacccgtcctcggcttc

SEQ ID NO: 21465 - RNA, 20 nt, synthetic construct
  source 1..20: mol_type = other RNA
tacaaagtattcagccctct

SEQ ID NO: 21466 - RNA, 20 nt, synthetic construct
  source 1..20: mol_type = other RNA
atgtctgaagatattcgtcg

SEQ ID NO: 21467 - RNA, 20 nt, synthetic construct
  source 1..20: mol_type = other RNA
gaagatattcgtcgtggacc

SEQ ID NO: 21468 - RNA, 20 nt, synthetic construct
  source 1..20: mol_type = other RNA
atattcgtcgtggacctggc

SEQ ID NO: 21469 - RNA, 20 nt, synthetic construct
  source 1..20: mol_type = other RNA
ggagtgcacgtatcagatta

SEQ ID NO: 21470 - RNA, 20 nt, synthetic construct
  source 1..20: mol_type = other RNA
cacgtatcagattacggtct

SEQ ID NO: 21471 - RNA, 20 nt, synthetic construct
  source 1..20: mol_type = other RNA
ctcggagcccgagctcgata

SEQ ID NO: 21472 - RNA, 20 nt, synthetic construct
  source 1..20: mol_type = other RNA
cgatatggaccttatcgaaa

SEQ ID NO: 21473 - RNA, 20 nt, synthetic construct
  source 1..20: mol_type = other RNA
tcaagaactatcctctgcgc

SEQ ID NO: 21474 - RNA, 20 nt, synthetic construct
  source 1..20: mol_type = other RNA
ctcgaccattcctaagtcgc

SEQ ID NO: 21475 - RNA, 20 nt, synthetic construct
  source 1..20: mol_type = other RNA
aattgctcacatcaagtcgc

SEQ ID NO: 21476 - RNA, 20 nt, synthetic construct
  source 1..20: mol_type = other RNA
caagtcgctggcctcggcta

SEQ ID NO: 21477 - RNA, 20 nt, synthetic construct
  source 1..20: mol_type = other RNA
ctaaataatacgctgtagtc

SEQ ID NO: 21478 - RNA, 20 nt, synthetic construct
  source 1..20: mol_type = other RNA
taatacgctgtagtccggtc

SEQ ID NO: 21479 - RNA, 20 nt, synthetic construct
  source 1..20: mol_type = other RNA
aatacgctgtagtccggtca

SEQ ID NO: 21480 - RNA, 20 nt, synthetic construct
  source 1..20: mol_type = other RNA
gcccggtaagacaaagctaa

SEQ ID NO: 21481 - RNA, 20 nt, synthetic construct
  source 1..20: mol_type = other RNA
caaagctaaaggcgttcagc

SEQ ID NO: 21482 - RNA, 20 nt, synthetic construct
  source 1..20: mol_type = other RNA
gcaatgcccgcccagcgtga

SEQ ID NO: 21483 - RNA, 20 nt, synthetic construct
  source 1..20: mol_type = other RNA
cggttacgtcaatcgagtga

SEQ ID NO: 21484 - RNA, 20 nt, synthetic construct
  source 1..20: mol_type = other RNA
ggttacgtcaatcgagtgaa

SEQ ID NO: 21485 - RNA, 20 nt, synthetic construct
  source 1..20: mol_type = other RNA
aatcgagtgaagggatccct

SEQ ID NO: 21486 - RNA, 20 nt, synthetic construct
  source 1..20: mol_type = other RNA
atcgagtgaagggatccctt

SEQ ID NO: 21487 - RNA, 20 nt, synthetic construct
  source 1..20: mol_type = other RNA
tctaaagcgcatgtatgcga

SEQ ID NO: 21488 - RNA, 20 nt, synthetic construct
  source 1..20: mol_type = other RNA
gtatgcgatggacgattcat

SEQ ID NO: 21489 - RNA, 20 nt, synthetic construct
  source 1..20: mol_type = other RNA
tatgcgatggacgattcatc

SEQ ID NO: 21490 - RNA, 20 nt, synthetic construct
  source 1..20: mol_type = other RNA
atgcgatggacgattcatcg

SEQ ID NO: 21491 - RNA, 20 nt, synthetic construct
  source 1..20: mol_type = other RNA
tgcgatggacgattcatcgg

SEQ ID NO: 21492 - RNA, 20 nt, synthetic construct
  source 1..20: mol_type = other RNA
ttctgcaatgttctgacata

SEQ ID NO: 21493 - RNA, 20 nt, synthetic construct
  source 1..20: mol_type = other RNA
ctgacatatggtgagtccgg

SEQ ID NO: 21494 - RNA, 20 nt, synthetic construct
  source 1..20: mol_type = other RNA
caaacgcacattcagcccat

SEQ ID NO: 21495 - RNA, 20 nt, synthetic construct
  source 1..20: mol_type = other RNA
tagggtgccggagttcacac

SEQ ID NO: 21496 - RNA, 20 nt, synthetic construct
  source 1..20: mol_type = other RNA
cgtgataacgaataaacgga

SEQ ID NO: 21497 - RNA, 20 nt, synthetic construct
  source 1..20: mol_type = other RNA
acgaataaacggaaggacct

SEQ ID NO: 21498 - RNA, 20 nt, synthetic construct
  source 1..20: mol_type = other RNA
cgaataaacggaaggacctg

SEQ ID NO: 21499 - RNA, 20 nt, synthetic construct
  source 1..20: mol_type = other RNA
tccgacctagtgcttcaacc

SEQ ID NO: 21500 - RNA, 20 nt, synthetic construct
  source 1..20: mol_type = other RNA
taaagtagcatgcgaacaca

SEQ ID NO: 21501 - RNA, 20 nt, synthetic construct
  source 1..20: mol_type = other RNA
aaagtagcatgcgaacacat

SEQ ID NO: 21502 - RNA, 20 nt, synthetic construct
  source 1..20: mol_type = other RNA
ttaatagacccgggctatgt

SEQ ID NO: 21503 - RNA, 20 nt, synthetic construct
  source 1..20: mol_type = other RNA
ttggtgcagttggtggccca

SEQ ID NO: 21504 - RNA, 20 nt, synthetic construct
  source 1..20: mol_type = other RNA
tacataggcgtattcggtga

SEQ ID NO: 21505 - RNA, 20 nt, synthetic construct
  source 1..20: mol_type = other RNA
aagaagttgcgttaacccaa

SEQ ID NO: 21506 - RNA, 20 nt, synthetic construct
  source 1..20: mol_type = other RNA
agttgcgttaacccaatgga

SEQ ID NO: 21507 - RNA, 20 nt, synthetic construct
  source 1..20: mol_type = other RNA
cctgtcgggtatgaacgtgc

SEQ ID NO: 21508 - RNA, 20 nt, synthetic construct
  source 1..20: mol_type = other RNA
gtcgggtatgaacgtgctgg

SEQ ID NO: 21509 - RNA, 20 nt, synthetic construct
  source 1..20: mol_type = other RNA
atgaacgtgctggtggtgaa

SEQ ID NO: 21510 - RNA, 20 nt, synthetic construct
  source 1..20: mol_type = other RNA
caggccatagacaccacaac

SEQ ID NO: 21511 - RNA, 20 nt, synthetic construct
  source 1..20: mol_type = other RNA
cacaaccggcatcactaaca

SEQ ID NO: 21512 - RNA, 20 nt, synthetic construct
  source 1..20: mol_type = other RNA
gttatcgttctaatcatcgt

SEQ ID NO: 21513 - RNA, 20 nt, synthetic construct
  source 1..20: mol_type = other RNA
ttatcgttctaatcatcgta

SEQ ID NO: 21514 - RNA, 20 nt, synthetic construct
  source 1..20: mol_type = other RNA
gcattcacggcaccgccacg

SEQ ID NO: 21515 - RNA, 20 nt, synthetic construct
  source 1..20: mol_type = other RNA
ttcacggcaccgccacgagg

SEQ ID NO: 21516 - RNA, 20 nt, synthetic construct
  source 1..20: mol_type = other RNA
tgaaagaagattcgagggac

SEQ ID NO: 21517 - RNA, 20 nt, synthetic construct
  source 1..20: mol_type = other RNA
tcgagggaccggacctctat

SEQ ID NO: 21518 - RNA, 20 nt, synthetic construct
  source 1..20: mol_type = other RNA
attataccgagcttcgcagc

SEQ ID NO: 21519 - RNA, 20 nt, synthetic construct
  source 1..20: mol_type = other RNA
accgagcttcgcagcaggct

SEQ ID NO: 21520 - RNA, 20 nt, synthetic construct
  source 1..20: mol_type = other RNA
ttcacaattgacccacaaca

SEQ ID NO: 21521 - RNA, 20 nt, synthetic construct
  source 1..20: mol_type = other RNA
gtagccttcggcgaacaaat

SEQ ID NO: 21522 - RNA, 20 nt, synthetic construct
  source 1..20: mol_type = other RNA
gaacctacttagatgtgccc

SEQ ID NO: 21523 - RNA, 20 nt, synthetic construct
  source 1..20: mol_type = other RNA
tagatgtgccctggtcccgt

SEQ ID NO: 21524 - RNA, 20 nt, synthetic construct
  source 1..20: mol_type = other RNA
cgtggagcctgaacttatcg

SEQ ID NO: 21525 - RNA, 20 nt, synthetic construct
  source 1..20: mol_type = other RNA
gagcctgaacttatcgtgga

SEQ ID NO: 21526 - RNA, 20 nt, synthetic construct
  source 1..20: mol_type = other RNA
atctccagctataatgacgc

SEQ ID NO: 21527 - RNA, 20 nt, synthetic construct
  source 1..20: mol_type = other RNA
gccgccacagaatgcggaag

SEQ ID NO: 21528 - RNA, 20 nt, synthetic construct
  source 1..20: mol_type = other RNA
cattacgcgtcaccagtgtc

SEQ ID NO: 21529 - RNA, 20 nt, synthetic construct
  source 1..20: mol_type = other RNA
aataggactgcttcttcgta

SEQ ID NO: 21530 - RNA, 20 nt, synthetic construct
  source 1..20: mol_type = other RNA
aacagagatcgttcaagttc

SEQ ID NO: 21531 - RNA, 20 nt, synthetic construct
  source 1..20: mol_type = other RNA
gagatcgttcaagttctgga

SEQ ID NO: 21532 - RNA, 20 nt, synthetic construct
  source 1..20: mol_type = other RNA
aagttctggacggtcgcatt

SEQ ID NO: 21533 - RNA, 20 nt, synthetic construct
  source 1..20: mol_type = other RNA
acttcgtacccattcaccct

SEQ ID NO: 21534 - RNA, 20 nt, synthetic construct
  source 1..20: mol_type = other RNA
cttcgtacccattcaccctc

SEQ ID NO: 21535 - RNA, 20 nt, synthetic construct
  source 1..20: mol_type = other RNA
cgggccctcccttatgaaga

SEQ ID NO: 21536 - RNA, 20 nt, synthetic construct
  source 1..20: mol_type = other RNA
aaggcctgaagggtgtcggt

SEQ ID NO: 21537 - RNA, 20 nt, synthetic construct
  source 1..20: mol_type = other RNA
ttggcaaggctattgaattc

SEQ ID NO: 21538 - RNA, 20 nt, synthetic construct
  source 1..20: mol_type = other RNA
aaggctattgaattcgggag

SEQ ID NO: 21539 - RNA, 20 nt, synthetic construct
  source 1..20: mol_type = other RNA
aggctattgaattcgggagt

SEQ ID NO: 21540 - RNA, 20 nt, synthetic construct
  source 1..20: mol_type = other RNA
aatggtgaatgtggcgcgac

SEQ ID NO: 21541 - RNA, 20 nt, synthetic construct
  source 1..20: mol_type = other RNA
cacggcttatatatccaaat

SEQ ID NO: 21542 - RNA, 20 nt, synthetic construct
  source 1..20: mol_type = other RNA
ttcagaaattctcgcagagt

SEQ ID NO: 21543 - RNA, 20 nt, synthetic construct
  source 1..20: mol_type = other RNA
gcaaatccgtaaacaacaaa

SEQ ID NO: 21544 - RNA, 20 nt, synthetic construct
  source 1..20: mol_type = other RNA
aacaaataatgagcttcgtc

SEQ ID NO: 21545 - RNA, 20 nt, synthetic construct
  source 1..20: mol_type = other RNA
atatcgtggaaggctcatcg

SEQ ID NO: 21546 - RNA, 20 nt, synthetic construct
  source 1..20: mol_type = other RNA
tatcgtggaaggctcatcga

SEQ ID NO: 21547 - RNA, 20 nt, synthetic construct
  source 1..20: mol_type = other RNA
cacatacgctgcttgcagtt

SEQ ID NO: 21548 - RNA, 20 nt, synthetic construct
  source 1..20: mol_type = other RNA
gtcatgctaccaattgcctc

SEQ ID NO: 21549 - RNA, 20 nt, synthetic construct
  source 1..20: mol_type = other RNA
cgccagaaattagcttatta

SEQ ID NO: 21550 - RNA, 20 nt, synthetic construct
  source 1..20: mol_type = other RNA
gggcatcgttatcctgctgc

SEQ ID NO: 21551 - RNA, 20 nt, synthetic construct
  source 1..20: mol_type = other RNA
tatgattgatcgtcccacaa

SEQ ID NO: 21552 - RNA, 20 nt, synthetic construct
  source 1..20: mol_type = other RNA
atgattgatcgtcccacaac

SEQ ID NO: 21553 - RNA, 20 nt, synthetic construct
  source 1..20: mol_type = other RNA
gtacgtataatgataacacg

SEQ ID NO: 21554 - RNA, 20 nt, synthetic construct
  source 1..20: mol_type = other RNA
tcttctacaactgctgtctc

SEQ ID NO: 21555 - RNA, 20 nt, synthetic construct
  source 1..20: mol_type = other RNA
tattgtaatataggtaggtt

SEQ ID NO: 21556 - RNA, 20 nt, synthetic construct
  source 1..20: mol_type = other RNA
cttgtaaatcgttatacctt

SEQ ID NO: 21557 - RNA, 20 nt, synthetic construct
  source 1..20: mol_type = other RNA
tcatcccgcagcggatgatg

SEQ ID NO: 21558 - RNA, 20 nt, synthetic construct
  source 1..20: mol_type = other RNA
ggtggtgcatatgggtattc

SEQ ID NO: 21559 - RNA, 20 nt, synthetic construct
  source 1..20: mol_type = other RNA
ggcataatcatcaaatgcga

SEQ ID NO: 21560 - RNA, 20 nt, synthetic construct
  source 1..20: mol_type = other RNA
aaatcctagcttgccggtaa

SEQ ID NO: 21561 - RNA, 20 nt, synthetic construct
  source 1..20: mol_type = other RNA
ccgttaacactaagatatag

SEQ ID NO: 21562 - RNA, 20 nt, synthetic construct
  source 1..20: mol_type = other RNA
atcactgtagtaggtctata

SEQ ID NO: 21563 - RNA, 20 nt, synthetic construct
  source 1..20: mol_type = other RNA
atagctcgatataaagttat

SEQ ID NO: 21564 - RNA, 20 nt, synthetic construct
  source 1..20: mol_type = other RNA
agctcgatataaagttatag

SEQ ID NO: 21565 - RNA, 20 nt, synthetic construct
  source 1..20: mol_type = other RNA
acagtcttatctgtgctaaa

SEQ ID NO: 21566 - RNA, 20 nt, synthetic construct
  source 1..20: mol_type = other RNA
aagtgaataggactcatcgt

SEQ ID NO: 21567 - RNA, 20 nt, synthetic construct
  source 1..20: mol_type = other RNA
tactctgaaacgatatatca

SEQ ID NO: 21568 - RNA, 20 nt, synthetic construct
  source 1..20: mol_type = other RNA
gtatcactatccaatactga

SEQ ID NO: 21569 - RNA, 20 nt, synthetic construct
  source 1..20: mol_type = other RNA
cattgcaacaacataatggt

SEQ ID NO: 21570 - RNA, 20 nt, synthetic construct
  source 1..20: mol_type = other RNA
tatcctatgtgttacaatca

SEQ ID NO: 21571 - RNA, 20 nt, synthetic construct
  source 1..20: mol_type = other RNA
atgataatgatctgattagg

SEQ ID NO: 21572 - RNA, 20 nt, synthetic construct
  source 1..20: mol_type = other RNA
gaaggcccgtatacctctca

SEQ ID NO: 21573 - RNA, 20 nt, synthetic construct
  source 1..20: mol_type = other RNA
gcagcgatactggtatgcca

SEQ ID NO: 21574 - RNA, 20 nt, synthetic construct
  source 1..20: mol_type = other RNA
gatgaacattgcttgtcaac

SEQ ID NO: 21575 - RNA, 20 nt, synthetic construct
  source 1..20: mol_type = other RNA
agagtgttacagcacatatt

SEQ ID NO: 21576 - RNA, 20 nt, synthetic construct
  source 1..20: mol_type = other RNA
ctataagggagtctatgaga

SEQ ID NO: 21577 - RNA, 20 nt, synthetic construct
  source 1..20: mol_type = other RNA
ttccgcaagcaccattaaca

SEQ ID NO: 21578 - RNA, 20 nt, synthetic construct
  source 1..20: mol_type = other RNA
caccattaacaagggaacga

SEQ ID NO: 21579 - RNA, 20 nt, synthetic construct
  source 1..20: mol_type = other RNA
accattaacaagggaacgat

SEQ ID NO: 21580 - RNA, 20 nt, synthetic construct
  source 1..20: mol_type = other RNA
aaattcacgcaaatattcga

SEQ ID NO: 21581 - RNA, 20 nt, synthetic construct
  source 1..20: mol_type = other RNA
aatattcgatggccaccgct

SEQ ID NO: 21582 - RNA, 20 nt, synthetic construct
  source 1..20: mol_type = other RNA
cttatgattgcgtgaaatga

SEQ ID NO: 21583 - RNA, 20 nt, synthetic construct
  source 1..20: mol_type = other RNA
atcgaaataatgagataatc

SEQ ID NO: 21584 - RNA, 20 nt, synthetic construct
  source 1..20: mol_type = other RNA
aatcagggtatataatgggt

SEQ ID NO: 21585 - RNA, 20 nt, synthetic construct
  source 1..20: mol_type = other RNA
agaatagtcgcccaatctaa

SEQ ID NO: 21586 - RNA, 20 nt, synthetic construct
  source 1..20: mol_type = other RNA
ccttgcaagctatcgcaaat

SEQ ID NO: 21587 - RNA, 20 nt, synthetic construct
  source 1..20: mol_type = other RNA
cttgcaagctatcgcaaata

SEQ ID NO: 21588 - RNA, 20 nt, synthetic construct
  source 1..20: mol_type = other RNA
catattcaggctcgacccat

SEQ ID NO: 21589 - RNA, 20 nt, synthetic construct
  source 1..20: mol_type = other RNA
gttagttgtgaagcgttctc

SEQ ID NO: 21590 - RNA, 20 nt, synthetic construct
  source 1..20: mol_type = other RNA
tgcatcgtccgtaagcagaa

SEQ ID NO: 21591 - RNA, 20 nt, synthetic construct
  source 1..20: mol_type = other RNA
acaaggctattgagctatac

SEQ ID NO: 21592 - RNA, 20 nt, synthetic construct
  source 1..20: mol_type = other RNA
tattgtacgatatgaggaac

SEQ ID NO: 21593 - RNA, 20 nt, synthetic construct
  source 1..20: mol_type = other RNA
tctgacccgcgcagttctta

SEQ ID NO: 21594 - RNA, 20 nt, synthetic construct
  source 1..20: mol_type = other RNA
aagtcttgagagcaacaacc

SEQ ID NO: 21595 - RNA, 20 nt, synthetic construct
  source 1..20: mol_type = other RNA
ttgagagcaacaaccaggta

SEQ ID NO: 21596 - RNA, 20 nt, synthetic construct
  source 1..20: mol_type = other RNA
cttgatgggaggcagcctca

SEQ ID NO: 21597 - RNA, 20 nt, synthetic construct
  source 1..20: mol_type = other RNA
gccgcaggagcaccgtggat

SEQ ID NO: 21598 - RNA, 20 nt, synthetic construct
  source 1..20: mol_type = other RNA
gctcctccacgctcgcgatc

SEQ ID NO: 21599 - RNA, 20 nt, synthetic construct
  source 1..20: mol_type = other RNA
ccacgctcgcgatccggcgc

SEQ ID NO: 21600 - RNA, 20 nt, synthetic construct
  source 1..20: mol_type = other RNA
tcgcgatccggcgctggaag

SEQ ID NO: 21601 - RNA, 20 nt, synthetic construct
  source 1..20: mol_type = other RNA
acccttgcgctcgatgtcgt

SEQ ID NO: 21602 - RNA, 20 nt, synthetic construct
  source 1..20: mol_type = other RNA
gtcggcttcccatacctcga

SEQ ID NO: 21603 - RNA, 20 nt, synthetic construct
  source 1..20: mol_type = other RNA
aatgcacccgagaaaccagc

SEQ ID NO: 21604 - RNA, 20 nt, synthetic construct
  source 1..20: mol_type = other RNA
tatcatatattaaagtgttg

SEQ ID NO: 21605 - RNA, 20 nt, synthetic construct
  source 1..20: mol_type = other RNA
ccattaatactgagcatgcc

SEQ ID NO: 21606 - RNA, 20 nt, synthetic construct
  source 1..20: mol_type = other RNA
cattaatactgagcatgccc

SEQ ID NO: 21607 - RNA, 20 nt, synthetic construct
  source 1..20: mol_type = other RNA
gattcatggacttcaacgag

SEQ ID NO: 21608 - RNA, 20 nt, synthetic construct
  source 1..20: mol_type = other RNA
cggcggcgtaacaccagtta

SEQ ID NO: 21609 - RNA, 20 nt, synthetic construct
  source 1..20: mol_type = other RNA
cataactggtgttacgccgc

SEQ ID NO: 21610 - RNA, 20 nt, synthetic construct
  source 1..20: mol_type = other RNA
ccgggcatgctcagtattaa

SEQ ID NO: 21611 - RNA, 20 nt, synthetic construct
  source 1..20: mol_type = other RNA
tcttctggatggagcgtatt

SEQ ID NO: 21612 - RNA, 20 nt, synthetic construct
  source 1..20: mol_type = other RNA
cttctggatggagcgtatta

SEQ ID NO: 21613 - RNA, 20 nt, synthetic construct
  source 1..20: mol_type = other RNA
ggtatatgattcgctccagc

SEQ ID NO: 21614 - RNA, 20 nt, synthetic construct
  source 1..20: mol_type = other RNA
gatatatcgttcatatcaac

SEQ ID NO: 21615 - RNA, 20 nt, synthetic construct
  source 1..20: mol_type = other RNA
ttgctgcagccgtcgaggta

SEQ ID NO: 21616 - RNA, 20 nt, synthetic construct
  source 1..20: mol_type = other RNA
agccgacgacatcgagcgca

SEQ ID NO: 21617 - RNA, 20 nt, synthetic construct
  source 1..20: mol_type = other RNA
gccgacgacatcgagcgcaa

SEQ ID NO: 21618 - RNA, 20 nt, synthetic construct
  source 1..20: mol_type = other RNA
acatcgagcgcaagggtccc

SEQ ID NO: 21619 - RNA, 20 nt, synthetic construct
  source 1..20: mol_type = other RNA
catcgagcgcaagggtccct

SEQ ID NO: 21620 - RNA, 20 nt, synthetic construct
  source 1..20: mol_type = other RNA
atcggttccgcttccagcgc

SEQ ID NO: 21621 - RNA, 20 nt, synthetic construct
  source 1..20: mol_type = other RNA
ccagcgccggatcgcgagcg

SEQ ID NO: 21622 - RNA, 20 nt, synthetic construct
  source 1..20: mol_type = other RNA
gcgccggatcgcgagcgtgg

SEQ ID NO: 21623 - RNA, 20 nt, synthetic construct
  source 1..20: mol_type = other RNA
cgtggaggagctcctatcca

SEQ ID NO: 21624 - RNA, 20 nt, synthetic construct
  source 1..20: mol_type = other RNA
agcagcagtaagaagtcgtg

SEQ ID NO: 21625 - RNA, 20 nt, synthetic construct
  source 1..20: mol_type = other RNA
aagcatagcaaatccctacc

SEQ ID NO: 21626 - RNA, 20 nt, synthetic construct
  source 1..20: mol_type = other RNA
tggcatccgtaagaactgcg

SEQ ID NO: 21627 - RNA, 20 nt, synthetic construct
  source 1..20: mol_type = other RNA
ggcatccgtaagaactgcgc

SEQ ID NO: 21628 - RNA, 20 nt, synthetic construct
  source 1..20: mol_type = other RNA
aaggccagttcagcaaagtc

SEQ ID NO: 21629 - RNA, 20 nt, synthetic construct
  source 1..20: mol_type = other RNA
ctaaaggagcatgacaaata

SEQ ID NO: 21630 - RNA, 20 nt, synthetic construct
  source 1..20: mol_type = other RNA
catgacaaatatggatagct

SEQ ID NO: 21631 - RNA, 20 nt, synthetic construct
  source 1..20: mol_type = other RNA
atagctcaatagccttgttg

SEQ ID NO: 21632 - RNA, 20 nt, synthetic construct
  source 1..20: mol_type = other RNA
cagaagttacctaccaaata

SEQ ID NO: 21633 - RNA, 20 nt, synthetic construct
  source 1..20: mol_type = other RNA
gacatgctacacatggctcc

SEQ ID NO: 21634 - RNA, 20 nt, synthetic construct
  source 1..20: mol_type = other RNA
atgctacacatggctccagg

SEQ ID NO: 21635 - RNA, 20 nt, synthetic construct
  source 1..20: mol_type = other RNA
gagcgtcttaaagtatgccc

SEQ ID NO: 21636 - RNA, 20 nt, synthetic construct
  source 1..20: mol_type = other RNA
aaagtatgccctggcaaagc

SEQ ID NO: 21637 - RNA, 20 nt, synthetic construct
  source 1..20: mol_type = other RNA
tacattattcgacattccat

SEQ ID NO: 21638 - RNA, 20 nt, synthetic construct
  source 1..20: mol_type = other RNA
ggcacattcatcttatcgct

SEQ ID NO: 21639 - RNA, 20 nt, synthetic construct
  source 1..20: mol_type = other RNA
atgctgcgtactataaccga

SEQ ID NO: 21640 - RNA, 20 nt, synthetic construct
  source 1..20: mol_type = other RNA
gcacttagtgccgcaatcaa

SEQ ID NO: 21641 - RNA, 20 nt, synthetic construct
  source 1..20: mol_type = other RNA
tcagatgacggtcattgatt

SEQ ID NO: 21642 - RNA, 20 nt, synthetic construct
  source 1..20: mol_type = other RNA
agacaacatcgacatcatcg

SEQ ID NO: 21643 - RNA, 20 nt, synthetic construct
  source 1..20: mol_type = other RNA
cgacatcatcgcggcttgca

SEQ ID NO: 21644 - RNA, 20 nt, synthetic construct
  source 1..20: mol_type = other RNA
ttacacagtcgtccaagcgg

SEQ ID NO: 21645 - RNA, 20 nt, synthetic construct
  source 1..20: mol_type = other RNA
tcccatcgttcccttgttaa

SEQ ID NO: 21646 - RNA, 20 nt, synthetic construct
  source 1..20: mol_type = other RNA
gtctgatcagaaagtgaagc

SEQ ID NO: 21647 - RNA, 20 nt, synthetic construct
  source 1..20: mol_type = other RNA
ttacagtcctgcaagcatca

SEQ ID NO: 21648 - RNA, 20 nt, synthetic construct
  source 1..20: mol_type = other RNA
gttgttccatgagaggtata

SEQ ID NO: 21649 - RNA, 20 nt, synthetic construct
  source 1..20: mol_type = other RNA
gagaggtatacgggccttca

SEQ ID NO: 21650 - RNA, 20 nt, synthetic construct
  source 1..20: mol_type = other RNA
agcccaaagaccttcagtat

SEQ ID NO: 21651 - RNA, 20 nt, synthetic construct
  source 1..20: mol_type = other RNA
cagtattggatagtgatact

SEQ ID NO: 21652 - RNA, 20 nt, synthetic construct
  source 1..20: mol_type = other RNA
tggatagtgatacttggagt

SEQ ID NO: 21653 - RNA, 20 nt, synthetic construct
  source 1..20: mol_type = other RNA
taagaggacgttctccgata

SEQ ID NO: 21654 - RNA, 20 nt, synthetic construct
  source 1..20: mol_type = other RNA
tagtatatccaaggacagct

SEQ ID NO: 21655 - RNA, 20 nt, synthetic construct
  source 1..20: mol_type = other RNA
acttaacatgaaccgcattg

SEQ ID NO: 21656 - RNA, 20 nt, synthetic construct
  source 1..20: mol_type = other RNA
aacatgaaccgcattgagga

SEQ ID NO: 21657 - RNA, 20 nt, synthetic construct
  source 1..20: mol_type = other RNA
gatgacaccgattctattgt

SEQ ID NO: 21658 - RNA, 20 nt, synthetic construct
  source 1..20: mol_type = other RNA
ataattatcaagctattacg

SEQ ID NO: 21659 - RNA, 20 nt, synthetic construct
  source 1..20: mol_type = other RNA
cctctatatcttagtgttaa

SEQ ID NO: 21660 - RNA, 20 nt, synthetic construct
  source 1..20: mol_type = other RNA
atagccattaccggcaagct

SEQ ID NO: 21661 - RNA, 20 nt, synthetic construct
  source 1..20: mol_type = other RNA
ctgaatgggatgtgatctta

SEQ ID NO: 21662 - RNA, 20 nt, synthetic construct
  source 1..20: mol_type = other RNA
tgaatgggatgtgatcttaa

SEQ ID NO: 21663 - RNA, 20 nt, synthetic construct
  source 1..20: mol_type = other RNA
acagggaatgacttggtctc

SEQ ID NO: 21664 - RNA, 20 nt, synthetic construct
  source 1..20: mol_type = other RNA
aacaggtaggattaaaccac

SEQ ID NO: 21665 - RNA, 20 nt, synthetic construct
  source 1..20: mol_type = other RNA
actataccaagcaatgctgc

SEQ ID NO: 21666 - RNA, 20 nt, synthetic construct
  source 1..20: mol_type = other RNA
gacatccgcatcatccgctg

SEQ ID NO: 21667 - RNA, 20 nt, synthetic construct
  source 1..20: mol_type = other RNA
acatccgcatcatccgctgc

SEQ ID NO: 21668 - RNA, 20 nt, synthetic construct
  source 1..20: mol_type = other RNA
gaagaatattcaacccgttg

SEQ ID NO: 21669 - RNA, 20 nt, synthetic construct
  source 1..20: mol_type = other RNA
ttgtccctctgccgccttaa

SEQ ID NO: 21670 - RNA, 20 nt, synthetic construct
  source 1..20: mol_type = other RNA
ttggtgttgattgacgttga

SEQ ID NO: 21671 - RNA, 20 nt, synthetic construct
  source 1..20: mol_type = other RNA
cttgccaaccgacacccttc

SEQ ID NO: 21672 - RNA, 20 nt, synthetic construct
  source 1..20: mol_type = other RNA
caaatactccttcttcataa

SEQ ID NO: 21673 - RNA, 20 nt, synthetic construct
  source 1..20: mol_type = other RNA
atactccttcttcataaggg

SEQ ID NO: 21674 - RNA, 20 nt, synthetic construct
  source 1..20: mol_type = other RNA
tcttcataagggagggcccg

SEQ ID NO: 21675 - RNA, 20 nt, synthetic construct
  source 1..20: mol_type = other RNA
cttcataagggagggcccga

SEQ ID NO: 21676 - RNA, 20 nt, synthetic construct
  source 1..20: mol_type = other RNA
gggagggcccgagggtgaat

SEQ ID NO: 21677 - RNA, 20 nt, synthetic construct
  source 1..20: mol_type = other RNA
ttgcgctaaagcggttatta

SEQ ID NO: 21678 - RNA, 20 nt, synthetic construct
  source 1..20: mol_type = other RNA
agtaaattctgcggttaaag

SEQ ID NO: 21679 - RNA, 20 nt, synthetic construct
  source 1..20: mol_type = other RNA
tctccaatatagccggacac

SEQ ID NO: 21680 - RNA, 20 nt, synthetic construct
  source 1..20: mol_type = other RNA
accgcttccgcattctgtgg

SEQ ID NO: 21681 - RNA, 20 nt, synthetic construct
  source 1..20: mol_type = other RNA
tggaacataatgtggcttgg

SEQ ID NO: 21682 - RNA, 20 nt, synthetic construct
  source 1..20: mol_type = other RNA
atagctggagatgttgacac

SEQ ID NO: 21683 - RNA, 20 nt, synthetic construct
  source 1..20: mol_type = other RNA
cacgataagttcaggctcca

SEQ ID NO: 21684 - RNA, 20 nt, synthetic construct
  source 1..20: mol_type = other RNA
gttcaggctccacggcgcct

SEQ ID NO: 21685 - RNA, 20 nt, synthetic construct
  source 1..20: mol_type = other RNA
gtgtaacaaacgcactccta

SEQ ID NO: 21686 - RNA, 20 nt, synthetic construct
  source 1..20: mol_type = other RNA
tgtaacaaacgcactcctac

SEQ ID NO: 21687 - RNA, 20 nt, synthetic construct
  source 1..20: mol_type = other RNA
aaacgcactcctacgggacc

SEQ ID NO: 21688 - RNA, 20 nt, synthetic construct
  source 1..20: mol_type = other RNA
aacgcactcctacgggacca

SEQ ID NO: 21689 - RNA, 20 nt, synthetic construct
  source 1..20: mol_type = other RNA
cactatctgaccacaaacgg

SEQ ID NO: 21690 - RNA, 20 nt, synthetic construct
  source 1..20: mol_type = other RNA
tgtgggtcaattgtgaatac

SEQ ID NO: 21691 - RNA, 20 nt, synthetic construct
  source 1..20: mol_type = other RNA
gtgggtcaattgtgaataca

SEQ ID NO: 21692 - RNA, 20 nt, synthetic construct
  source 1..20: mol_type = other RNA
tgaatacagggaagttgatg

SEQ ID NO: 21693 - RNA, 20 nt, synthetic construct
  source 1..20: mol_type = other RNA
gaagctcggtataatcgtgt

SEQ ID NO: 21694 - RNA, 20 nt, synthetic construct
  source 1..20: mol_type = other RNA
ctagagaacctatagaggtc

SEQ ID NO: 21695 - RNA, 20 nt, synthetic construct
  source 1..20: mol_type = other RNA
cgtgttagtgatgccggttg

SEQ ID NO: 21696 - RNA, 20 nt, synthetic construct
  source 1..20: mol_type = other RNA
gatgccggttgtggtgtcta

SEQ ID NO: 21697 - RNA, 20 nt, synthetic construct
  source 1..20: mol_type = other RNA
ccagcacgttcatacccgac

SEQ ID NO: 21698 - RNA, 20 nt, synthetic construct
  source 1..20: mol_type = other RNA
cagcacgttcatacccgaca

SEQ ID NO: 21699 - RNA, 20 nt, synthetic construct
  source 1..20: mol_type = other RNA
atgtcctgcgtccatccatt

SEQ ID NO: 21700 - RNA, 20 nt, synthetic construct
  source 1..20: mol_type = other RNA
attgggttaacgcaacttct

SEQ ID NO: 21701 - RNA, 20 nt, synthetic construct
  source 1..20: mol_type = other RNA
caaatctaccctcgcctctt

SEQ ID NO: 21702 - RNA, 20 nt, synthetic construct
  source 1..20: mol_type = other RNA
gcgcaaacagcggaaatatt

SEQ ID NO: 21703 - RNA, 20 nt, synthetic construct
  source 1..20: mol_type = other RNA
ggtcaggcacatggtcacct

SEQ ID NO: 21704 - RNA, 20 nt, synthetic construct
  source 1..20: mol_type = other RNA
atgagctcgcccacatagcc

SEQ ID NO: 21705 - RNA, 20 nt, synthetic construct
  source 1..20: mol_type = other RNA
tgagctcgcccacatagccc

SEQ ID NO: 21706 - RNA, 20 nt, synthetic construct
  source 1..20: mol_type = other RNA
caaggatgagcagccgttca

SEQ ID NO: 21707 - RNA, 20 nt, synthetic construct
  source 1..20: mol_type = other RNA
aaggatgagcagccgttcat

SEQ ID NO: 21708 - RNA, 20 nt, synthetic construct
  source 1..20: mol_type = other RNA
ttagtccaggttgaagcact

SEQ ID NO: 21709 - RNA, 20 nt, synthetic construct
  source 1..20: mol_type = other RNA
ttattcgttatcacggaagg

SEQ ID NO: 21710 - RNA, 20 nt, synthetic construct
  source 1..20: mol_type = other RNA
tattcgttatcacggaaggt

SEQ ID NO: 21711 - RNA, 20 nt, synthetic construct
  source 1..20: mol_type = other RNA
tacaaatcaacaaacggcgg

SEQ ID NO: 21712 - RNA, 20 nt, synthetic construct
  source 1..20: mol_type = other RNA
gcggaggatgacaatattat

SEQ ID NO: 21713 - RNA, 20 nt, synthetic construct
  source 1..20: mol_type = other RNA
cggaggatgacaatattatt

SEQ ID NO: 21714 - RNA, 20 nt, synthetic construct
  source 1..20: mol_type = other RNA
tgggagcatatgcgataaac

SEQ ID NO: 21715 - RNA, 20 nt, synthetic construct
  source 1..20: mol_type = other RNA
gggagcatatgcgataaaca

SEQ ID NO: 21716 - RNA, 20 nt, synthetic construct
  source 1..20: mol_type = other RNA
gtgtgaactccggcacccta

SEQ ID NO: 21717 - RNA, 20 nt, synthetic construct
  source 1..20: mol_type = other RNA
tgtgaactccggcaccctat

SEQ ID NO: 21718 - RNA, 20 nt, synthetic construct
  source 1..20: mol_type = other RNA
cattgcagaatacggaggct

SEQ ID NO: 21719 - RNA, 20 nt, synthetic construct
  source 1..20: mol_type = other RNA
gttgtctataactattgtgt

SEQ ID NO: 21720 - RNA, 20 nt, synthetic construct
  source 1..20: mol_type = other RNA
gtgttaaacaacatggctaa

SEQ ID NO: 21721 - RNA, 20 nt, synthetic construct
  source 1..20: mol_type = other RNA
tcttaccgggcgtaaatgat

SEQ ID NO: 21722 - RNA, 20 nt, synthetic construct
  source 1..20: mol_type = other RNA
cttaccgggcgtaaatgata

SEQ ID NO: 21723 - RNA, 20 nt, synthetic construct
  source 1..20: mol_type = other RNA
cgtaaatgatagggcaacgg

SEQ ID NO: 21724 - RNA, 20 nt, synthetic construct
  source 1..20: mol_type = other RNA
aactgtgacgcaaccctgac

SEQ ID NO: 21725 - RNA, 20 nt, synthetic construct
  source 1..20: mol_type = other RNA
cttgtcggtgaccatagccg

SEQ ID NO: 21726 - RNA, 20 nt, synthetic construct
  source 1..20: mol_type = other RNA
ctgcgacttaggaatggtcg

SEQ ID NO: 21727 - RNA, 20 nt, synthetic construct
  source 1..20: mol_type = other RNA
acttaggaatggtcgaggtc

SEQ ID NO: 21728 - RNA, 20 nt, synthetic construct
  source 1..20: mol_type = other RNA
cgaggtcaggttgatcttgt

SEQ ID NO: 21729 - RNA, 20 nt, synthetic construct
  source 1..20: mol_type = other RNA
gataaggtccatatcgagct

SEQ ID NO: 21730 - RNA, 20 nt, synthetic construct
  source 1..20: mol_type = other RNA
ataaggtccatatcgagctc

SEQ ID NO: 21731 - RNA, 20 nt, synthetic construct
  source 1..20: mol_type = other RNA
cttgtcatagcggtgaacga

SEQ ID NO: 21732 - RNA, 20 nt, synthetic construct
  source 1..20: mol_type = other RNA
taacaaagcttgcttgcgac

SEQ ID NO: 21733 - RNA, 20 nt, synthetic construct
  source 1..20: mol_type = other RNA
aatgcccttgcgctcaaagt

SEQ ID NO: 21734 - RNA, 20 nt, synthetic construct
  source 1..20: mol_type = other RNA
atgcccttgcgctcaaagtt

SEQ ID NO: 21735 - RNA, 20 nt, synthetic construct
  source 1..20: mol_type = other RNA
agattagagcagataacttg

SEQ ID NO: 21736 - RNA, 20 nt, synthetic construct
  source 1..20: mol_type = other RNA
gattagagcagataacttgg

SEQ ID NO: 21737 - RNA, 20 nt, synthetic construct
  source 1..20: mol_type = other RNA
agagggatcttgtggcctag

SEQ ID NO: 21738 - RNA, 20 nt, synthetic construct
  source 1..20: mol_type = other RNA
gagggatcttgtggcctaga

SEQ ID NO: 21739 - RNA, 20 nt, synthetic construct
  source 1..20: mol_type = other RNA
agtgaacacgacatccatcc

SEQ ID NO: 21740 - RNA, 20 nt, synthetic construct
  source 1..20: mol_type = other RNA
gtgaacacgacatccatccc

SEQ ID NO: 21741 - RNA, 20 nt, synthetic construct
  source 1..20: mol_type = other RNA
atccatcccgggcgccaact

SEQ ID NO: 21742 - RNA, 20 nt, synthetic construct
  source 1..20: mol_type = other RNA
catcccgggcgccaacttgg

SEQ ID NO: 21743 - RNA, 20 nt, synthetic construct
  source 1..20: mol_type = other RNA
ctccgggtcggcgtccgtgt

SEQ ID NO: 21744 - RNA, 20 nt, synthetic construct
  source 1..20: mol_type = other RNA
tggcttctagcgggtgcata

SEQ ID NO: 21745 - RNA, 20 nt, synthetic construct
  source 1..20: mol_type = other RNA
ggcttctagcgggtgcataa

SEQ ID NO: 21746 - RNA, 20 nt, synthetic construct
  source 1..20: mol_type = other RNA
cataagggaaaggttgtgtc

SEQ ID NO: 21747 - RNA, 20 nt, synthetic construct
  source 1..20: mol_type = other RNA
tcgggccgttcgttcgatga

SEQ ID NO: 21748 - RNA, 20 nt, synthetic construct
  source 1..20: mol_type = other RNA
gttctgctgagcttgccgtt

SEQ ID NO: 21749 - RNA, 20 nt, synthetic construct
  source 1..20: mol_type = other RNA
ttctgctgagcttgccgttc

SEQ ID NO: 21750 - RNA, 20 nt, synthetic construct
  source 1..20: mol_type = other RNA
ggatgtccgccaaggagtcg

SEQ ID NO: 21751 - RNA, 20 nt, synthetic construct
  source 1..20: mol_type = other RNA
gtccgccaaggagtcgaggt

SEQ ID NO: 21752 - RNA, 20 nt, synthetic construct
  source 1..20: mol_type = other RNA
tactattctcattgctatcg

SEQ ID NO: 21753 - RNA, 20 nt, synthetic construct
  source 1..20: mol_type = other RNA
gcagaagtcactccacaacc

SEQ ID NO: 21754 - RNA, 20 nt, synthetic construct
  source 1..20: mol_type = other RNA
acaaccaggtacctctaaac

SEQ ID NO: 21755 - RNA, 20 nt, synthetic construct
  source 1..20: mol_type = other RNA
ccaggtacctctaaaccggc

SEQ ID NO: 21756 - RNA, 20 nt, synthetic construct
  source 1..20: mol_type = other RNA
agtgcaggcaaaccagtcac

SEQ ID NO: 21757 - RNA, 20 nt, synthetic construct
  source 1..20: mol_type = other RNA
caaaccagtcacgggcagac

SEQ ID NO: 21758 - RNA, 20 nt, synthetic construct
  source 1..20: mol_type = other RNA
agtcacggacaacccagtta

SEQ ID NO: 21759 - RNA, 20 nt, synthetic construct
  source 1..20: mol_type = other RNA
agttacggacagactagtca

SEQ ID NO: 21760 - RNA, 20 nt, synthetic construct
  source 1..20: mol_type = other RNA
agactagtcatggcaactgg

SEQ ID NO: 21761 - RNA, 20 nt, synthetic construct
  source 1..20: mol_type = other RNA
gactagtcatggcaactggc

SEQ ID NO: 21762 - RNA, 20 nt, synthetic construct
  source 1..20: mol_type = other RNA
catggcaactggcgggccag

SEQ ID NO: 21763 - RNA, 20 nt, synthetic construct
  source 1..20: mol_type = other RNA
gaatccgcaggcccaagagg

SEQ ID NO: 21764 - RNA, 20 nt, synthetic construct
  source 1..20: mol_type = other RNA
catcaaagatgggctctcga

SEQ ID NO: 21765 - RNA, 20 nt, synthetic construct
  source 1..20: mol_type = other RNA
caaagatgggctctcgaagg

SEQ ID NO: 21766 - RNA, 20 nt, synthetic construct
  source 1..20: mol_type = other RNA
taccattctaagcatcctta

SEQ ID NO: 21767 - RNA, 20 nt, synthetic construct
  source 1..20: mol_type = other RNA
atggtcgcagataacctgta

SEQ ID NO: 21768 - RNA, 20 nt, synthetic construct
  source 1..20: mol_type = other RNA
ggtcgcagataacctgtacg

SEQ ID NO: 21769 - RNA, 20 nt, synthetic construct
  source 1..20: mol_type = other RNA
aaagaagaagagtagctcgg

SEQ ID NO: 21770 - RNA, 20 nt, synthetic construct
  source 1..20: mol_type = other RNA
atatagcccgggagttcctt

SEQ ID NO: 21771 - RNA, 20 nt, synthetic construct
  source 1..20: mol_type = other RNA
tatagcccgggagttccttc

SEQ ID NO: 21772 - RNA, 20 nt, synthetic construct
  source 1..20: mol_type = other RNA
agttccttcgggccttcaac

SEQ ID NO: 21773 - RNA, 20 nt, synthetic construct
  source 1..20: mol_type = other RNA
tctatacatggcatgaattc

SEQ ID NO: 21774 - RNA, 20 nt, synthetic construct
  source 1..20: mol_type = other RNA
gcatgaattccgggtatatt

SEQ ID NO: 21775 - RNA, 20 nt, synthetic construct
  source 1..20: mol_type = other RNA
catgaattccgggtatatta

SEQ ID NO: 21776 - RNA, 20 nt, synthetic construct
  source 1..20: mol_type = other RNA
gctcactcacttctgagtgc

SEQ ID NO: 21777 - RNA, 20 nt, synthetic construct
  source 1..20: mol_type = other RNA
atggcatcgtataccgcaac

SEQ ID NO: 21778 - RNA, 20 nt, synthetic construct
  source 1..20: mol_type = other RNA
cgccaatgccttcacacatt

SEQ ID NO: 21779 - RNA, 20 nt, synthetic construct
  source 1..20: mol_type = other RNA
ttcacacattcggtgacgct

SEQ ID NO: 21780 - RNA, 20 nt, synthetic construct
  source 1..20: mol_type = other RNA
tcacacattcggtgacgcta

SEQ ID NO: 21781 - RNA, 20 nt, synthetic construct
  source 1..20: mol_type = other RNA
cacacattcggtgacgctag

SEQ ID NO: 21782 - RNA, 20 nt, synthetic construct
  source 1..20: mol_type = other RNA
acacattcggtgacgctagg

SEQ ID NO: 21783 - RNA, 20 nt, synthetic construct
  source 1..20: mol_type = other RNA
gctgctccgataatgacatg

SEQ ID NO: 21784 - RNA, 20 nt, synthetic construct
  source 1..20: mol_type = other RNA
ccgcagcaaatggcgacgca

SEQ ID NO: 21785 - RNA, 20 nt, synthetic construct
  source 1..20: mol_type = other RNA
cagcaaatggcgacgcacgg

SEQ ID NO: 21786 - RNA, 20 nt, synthetic construct
  source 1..20: mol_type = other RNA
tagcccgtccagtgcgagaa

SEQ ID NO: 21787 - RNA, 20 nt, synthetic construct
  source 1..20: mol_type = other RNA
cccgtccagtgcgagaatgg

SEQ ID NO: 21788 - RNA, 20 nt, synthetic construct
  source 1..20: mol_type = other RNA
tcttaaggcgctcaccgtta

SEQ ID NO: 21789 - RNA, 20 nt, synthetic construct
  source 1..20: mol_type = other RNA
aggcgctcaccgttacggcg

SEQ ID NO: 21790 - RNA, 20 nt, synthetic construct
  source 1..20: mol_type = other RNA
ggcgctcaccgttacggcgc

SEQ ID NO: 21791 - RNA, 20 nt, synthetic construct
  source 1..20: mol_type = other RNA
gttacggcgcgggcattgcc

SEQ ID NO: 21792 - RNA, 20 nt, synthetic construct
  source 1..20: mol_type = other RNA
ttacggcgcgggcattgcct

SEQ ID NO: 21793 - RNA, 20 nt, synthetic construct
  source 1..20: mol_type = other RNA
aaagcacatagccataagac

SEQ ID NO: 21794 - RNA, 20 nt, synthetic construct
  source 1..20: mol_type = other RNA
ggaaactgccttcacgctgc

SEQ ID NO: 21795 - RNA, 20 nt, synthetic construct
  source 1..20: mol_type = other RNA
gaaactgccttcacgctgca

SEQ ID NO: 21796 - RNA, 20 nt, synthetic construct
  source 1..20: mol_type = other RNA
cctacatctaaataccggtt

SEQ ID NO: 21797 - RNA, 20 nt, synthetic construct
  source 1..20: mol_type = other RNA
caaagagtacgacgtcatcg

SEQ ID NO: 21798 - RNA, 20 nt, synthetic construct
  source 1..20: mol_type = other RNA
aaagagtacgacgtcatcgt

SEQ ID NO: 21799 - RNA, 20 nt, synthetic construct
  source 1..20: mol_type = other RNA
tggtctagtcgtgttagatg

SEQ ID NO: 21800 - RNA, 20 nt, synthetic construct
  source 1..20: mol_type = other RNA
ggcacatgaattacactcgc

SEQ ID NO: 21801 - RNA, 20 nt, synthetic construct
  source 1..20: mol_type = other RNA
atacaacttagtcggatatt

SEQ ID NO: 21802 - RNA, 20 nt, synthetic construct
  source 1..20: mol_type = other RNA
cctggaccggcccgatggta

SEQ ID NO: 21803 - RNA, 20 nt, synthetic construct
  source 1..20: mol_type = other RNA
cgtgagggaaatcgaatatc

SEQ ID NO: 21804 - RNA, 20 nt, synthetic construct
  source 1..20: mol_type = other RNA
tatacaacttgtcgtaaatg

SEQ ID NO: 21805 - RNA, 20 nt, synthetic construct
  source 1..20: mol_type = other RNA
taccgctgagcctcacaaat

SEQ ID NO: 21806 - RNA, 20 nt, synthetic construct
  source 1..20: mol_type = other RNA
accgctgagcctcacaaatg

SEQ ID NO: 21807 - RNA, 20 nt, synthetic construct
  source 1..20: mol_type = other RNA
ccgctgagcctcacaaatgg

SEQ ID NO: 21808 - RNA, 20 nt, synthetic construct
  source 1..20: mol_type = other RNA
tgttcaaattgtcgttccgg

SEQ ID NO: 21809 - RNA, 20 nt, synthetic construct
  source 1..20: mol_type = other RNA
gaggtggcgctcctatgcgg

SEQ ID NO: 21810 - RNA, 20 nt, synthetic construct
  source 1..20: mol_type = other RNA
aggtggcgctcctatgcggc

SEQ ID NO: 21811 - RNA, 20 nt, synthetic construct
  source 1..20: mol_type = other RNA
tccattatcttgctgaccta

SEQ ID NO: 21812 - RNA, 20 nt, synthetic construct
  source 1..20: mol_type = other RNA
acctatggctacgggcgtag

SEQ ID NO: 21813 - RNA, 20 nt, synthetic construct
  source 1..20: mol_type = other RNA
gcatatgacatcgatcatca

SEQ ID NO: 21814 - RNA, 20 nt, synthetic construct
  source 1..20: mol_type = other RNA
cttgggacgtattacccggc

SEQ ID NO: 21815 - RNA, 20 nt, synthetic construct
  source 1..20: mol_type = other RNA
ttgggacgtattacccggca

SEQ ID NO: 21816 - RNA, 20 nt, synthetic construct
  source 1..20: mol_type = other RNA
acgtattacccggcagggat

SEQ ID NO: 21817 - RNA, 20 nt, synthetic construct
  source 1..20: mol_type = other RNA
gccaggtctacgacaggcac

SEQ ID NO: 21818 - RNA, 20 nt, synthetic construct
  source 1..20: mol_type = other RNA
ctcctcatctatcaccagat

SEQ ID NO: 21819 - RNA, 20 nt, synthetic construct
  source 1..20: mol_type = other RNA
atctatcaccagatgggcat

SEQ ID NO: 21820 - RNA, 20 nt, synthetic construct
  source 1..20: mol_type = other RNA
gtccctagacgcttacaaca

SEQ ID NO: 21821 - RNA, 20 nt, synthetic construct
  source 1..20: mol_type = other RNA
tccctagacgcttacaacat

SEQ ID NO: 21822 - RNA, 20 nt, synthetic construct
  source 1..20: mol_type = other RNA
ccctagacgcttacaacatg

SEQ ID NO: 21823 - RNA, 20 nt, synthetic construct
  source 1..20: mol_type = other RNA
cagcagatcataaaggcggg

SEQ ID NO: 21824 - RNA, 20 nt, synthetic construct
  source 1..20: mol_type = other RNA
ttgcctgctcatcgttgacg

SEQ ID NO: 21825 - RNA, 20 nt, synthetic construct
  source 1..20: mol_type = other RNA
caaactactaaaccgcctag

SEQ ID NO: 21826 - RNA, 20 nt, synthetic construct
  source 1..20: mol_type = other RNA
aaactactaaaccgcctagt

SEQ ID NO: 21827 - RNA, 20 nt, synthetic construct
  source 1..20: mol_type = other RNA
gtgggtatgataagctacgc

SEQ ID NO: 21828 - RNA, 20 nt, synthetic construct
  source 1..20: mol_type = other RNA
aaatgtcacccgagcagtat

SEQ ID NO: 21829 - RNA, 20 nt, synthetic construct
  source 1..20: mol_type = other RNA
gcagtataggcaatatctgc

SEQ ID NO: 21830 - RNA, 20 nt, synthetic construct
  source 1..20: mol_type = other RNA
gtccgaaatgctaacagtaa

SEQ ID NO: 21831 - RNA, 20 nt, synthetic construct
  source 1..20: mol_type = other RNA
ggaattgggccttcacgtcg

SEQ ID NO: 21832 - RNA, 20 nt, synthetic construct
  source 1..20: mol_type = other RNA
agagcgcgacatgatccagc

SEQ ID NO: 21833 - RNA, 20 nt, synthetic construct
  source 1..20: mol_type = other RNA
aattcgccgctgaatataca

SEQ ID NO: 21834 - RNA, 20 nt, synthetic construct
  source 1..20: mol_type = other RNA
gccgctgaatatacacggag

SEQ ID NO: 21835 - RNA, 20 nt, synthetic construct
  source 1..20: mol_type = other RNA
gagggattggatctcaaata

SEQ ID NO: 21836 - RNA, 20 nt, synthetic construct
  source 1..20: mol_type = other RNA
gattggatctcaaatacggg

SEQ ID NO: 21837 - RNA, 20 nt, synthetic construct
  source 1..20: mol_type = other RNA
ggatctcaaatacgggcggc

SEQ ID NO: 21838 - RNA, 20 nt, synthetic construct
  source 1..20: mol_type = other RNA
ttcatatcctagagccgtac

SEQ ID NO: 21839 - RNA, 20 nt, synthetic construct
  source 1..20: mol_type = other RNA
tcatatcctagagccgtact

SEQ ID NO: 21840 - RNA, 20 nt, synthetic construct
  source 1..20: mol_type = other RNA
cctagagccgtactgggata

SEQ ID NO: 21841 - RNA, 20 nt, synthetic construct
  source 1..20: mol_type = other RNA
gtactgggataaggcccgag

SEQ ID NO: 21842 - RNA, 20 nt, synthetic construct
  source 1..20: mol_type = other RNA
aaggcgcgcattatacgcat

SEQ ID NO: 21843 - RNA, 20 nt, synthetic construct
  source 1..20: mol_type = other RNA
ccacgatgcgctaccgcccg

SEQ ID NO: 21844 - RNA, 20 nt, synthetic construct
  source 1..20: mol_type = other RNA
gccattgaatgtgccttcaa

SEQ ID NO: 21845 - RNA, 20 nt, synthetic construct
  source 1..20: mol_type = other RNA
tgtgccttcaacggcgaaag

SEQ ID NO: 21846 - RNA, 20 nt, synthetic construct
  source 1..20: mol_type = other RNA
agcctatagcatatcctacg

SEQ ID NO: 21847 - RNA, 20 nt, synthetic construct
  source 1..20: mol_type = other RNA
gcctatagcatatcctacga

SEQ ID NO: 21848 - RNA, 20 nt, synthetic construct
  source 1..20: mol_type = other RNA
cgaatataatcccatcatta

SEQ ID NO: 21849 - RNA, 20 nt, synthetic construct
  source 1..20: mol_type = other RNA
atcattaaggtcattgactt

SEQ ID NO: 21850 - RNA, 20 nt, synthetic construct
  source 1..20: mol_type = other RNA
aactgtgtggacgataggta

SEQ ID NO: 21851 - RNA, 20 nt, synthetic construct
  source 1..20: mol_type = other RNA
gtggacgataggtatggtcg

SEQ ID NO: 21852 - RNA, 20 nt, synthetic construct
  source 1..20: mol_type = other RNA
aaacacggtcacccgttgtt

SEQ ID NO: 21853 - RNA, 20 nt, synthetic construct
  source 1..20: mol_type = other RNA
ggtcacccgttgttaggttg

SEQ ID NO: 21854 - RNA, 20 nt, synthetic construct
  source 1..20: mol_type = other RNA
gattggagaggctatccaca

SEQ ID NO: 21855 - RNA, 20 nt, synthetic construct
  source 1..20: mol_type = other RNA
tggaccgaaagagtatctaa

SEQ ID NO: 21856 - RNA, 20 nt, synthetic construct
  source 1..20: mol_type = other RNA
ggaccgaaagagtatctaat

SEQ ID NO: 21857 - RNA, 20 nt, synthetic construct
  source 1..20: mol_type = other RNA
tcacaggaagaagctctact

SEQ ID NO: 21858 - RNA, 20 nt, synthetic construct
  source 1..20: mol_type = other RNA
ggaagaagctctacttggtt

SEQ ID NO: 21859 - RNA, 20 nt, synthetic construct
  source 1..20: mol_type = other RNA
gaacaaccttgaactcgaag

SEQ ID NO: 21860 - RNA, 20 nt, synthetic construct
  source 1..20: mol_type = other RNA
ctcggcagtgccgtgaaggt

SEQ ID NO: 21861 - RNA, 20 nt, synthetic construct
  source 1..20: mol_type = other RNA
gtcgggccacagtatcttaa

SEQ ID NO: 21862 - RNA, 20 nt, synthetic construct
  source 1..20: mol_type = other RNA
tcgggccacagtatcttaac

SEQ ID NO: 21863 - RNA, 20 nt, synthetic construct
  source 1..20: mol_type = other RNA
caatacttagacgcaccata

SEQ ID NO: 21864 - RNA, 20 nt, synthetic construct
  source 1..20: mol_type = other RNA
taggacgatgcagcccatcc

SEQ ID NO: 21865 - RNA, 20 nt, synthetic construct
  source 1..20: mol_type = other RNA
ggcgtgcatccaccgccaca

SEQ ID NO: 21866 - RNA, 20 nt, synthetic construct
  source 1..20: mol_type = other RNA
taggtatgagattgttccat

SEQ ID NO: 21867 - RNA, 20 nt, synthetic construct
  source 1..20: mol_type = other RNA
aggtatgagattgttccatc

SEQ ID NO: 21868 - RNA, 20 nt, synthetic construct
  source 1..20: mol_type = other RNA
tatgagattgttccatcggg

SEQ ID NO: 21869 - RNA, 20 nt, synthetic construct
  source 1..20: mol_type = other RNA
attgttccatcgggagggat

SEQ ID NO: 21870 - RNA, 20 nt, synthetic construct
  source 1..20: mol_type = other RNA
ttgttccatcgggagggata

SEQ ID NO: 21871 - RNA, 20 nt, synthetic construct
  source 1..20: mol_type = other RNA
tatctccttgatgccgcaac

SEQ ID NO: 21872 - RNA, 20 nt, synthetic construct
  source 1..20: mol_type = other RNA
atctccttgatgccgcaact

SEQ ID NO: 21873 - RNA, 20 nt, synthetic construct
  source 1..20: mol_type = other RNA
cttgatgccgcaactgggaa

SEQ ID NO: 21874 - RNA, 20 nt, synthetic construct
  source 1..20: mol_type = other RNA
acattcgatgttaagcgccc

SEQ ID NO: 21875 - RNA, 20 nt, synthetic construct
  source 1..20: mol_type = other RNA
atgcgatgttgagaccacaa

SEQ ID NO: 21876 - RNA, 20 nt, synthetic construct
  source 1..20: mol_type = other RNA
tatatcaagcccgtgttgtt

SEQ ID NO: 21877 - RNA, 20 nt, synthetic construct
  source 1..20: mol_type = other RNA
tcaagatgcgccagcgagaa

SEQ ID NO: 21878 - RNA, 20 nt, synthetic construct
  source 1..20: mol_type = other RNA
caagatgcgccagcgagaac

SEQ ID NO: 21879 - RNA, 20 nt, synthetic construct
  source 1..20: mol_type = other RNA
gcgagaacgggctcgctatg

SEQ ID NO: 21880 - RNA, 20 nt, synthetic construct
  source 1..20: mol_type = other RNA
ttcaggcgccagccactggt

SEQ ID NO: 21881 - RNA, 20 nt, synthetic construct
  source 1..20: mol_type = other RNA
tcaggcgccagccactggta

SEQ ID NO: 21882 - RNA, 20 nt, synthetic construct
  source 1..20: mol_type = other RNA
gcctggtggcgatcatgtcg

SEQ ID NO: 21883 - RNA, 20 nt, synthetic construct
  source 1..20: mol_type = other RNA
gtcgcggtaatacttgatga

SEQ ID NO: 21884 - RNA, 20 nt, synthetic construct
  source 1..20: mol_type = other RNA
gatgatggttctaaactggt

SEQ ID NO: 21885 - RNA, 20 nt, synthetic construct
  source 1..20: mol_type = other RNA
ctaaactggtaggaaatgcg

SEQ ID NO: 21886 - RNA, 20 nt, synthetic construct
  source 1..20: mol_type = other RNA
aatgcgtggtgatatgttct

SEQ ID NO: 21887 - RNA, 20 nt, synthetic construct
  source 1..20: mol_type = other RNA
taatctggctcaccgaggat

SEQ ID NO: 21888 - RNA, 20 nt, synthetic construct
  source 1..20: mol_type = other RNA
aggtcttctacgtcgatgtc

SEQ ID NO: 21889 - RNA, 20 nt, synthetic construct
  source 1..20: mol_type = other RNA
gtcgatgtctggaatcgaga

SEQ ID NO: 21890 - RNA, 20 nt, synthetic construct
  source 1..20: mol_type = other RNA
agatggcattgtacactcct

SEQ ID NO: 21891 - RNA, 20 nt, synthetic construct
  source 1..20: mol_type = other RNA
taggtcctcgaagttgggaa

SEQ ID NO: 21892 - RNA, 20 nt, synthetic construct
  source 1..20: mol_type = other RNA
aggtcctcgaagttgggaat

SEQ ID NO: 21893 - RNA, 20 nt, synthetic construct
  source 1..20: mol_type = other RNA
ggtcctcgaagttgggaatg

SEQ ID NO: 21894 - RNA, 20 nt, synthetic construct
  source 1..20: mol_type = other RNA
gtcctcgaagttgggaatgg

SEQ ID NO: 21895 - RNA, 20 nt, synthetic construct
  source 1..20: mol_type = other RNA
tactgttctaattcgtcttc

SEQ ID NO: 21896 - RNA, 20 nt, synthetic construct
  source 1..20: mol_type = other RNA
aaaggtgtactcattatgcg

SEQ ID NO: 21897 - RNA, 20 nt, synthetic construct
  source 1..20: mol_type = other RNA
aaggtgtactcattatgcgc

SEQ ID NO: 21898 - RNA, 20 nt, synthetic construct
  source 1..20: mol_type = other RNA
tacggacctatcatactcat

SEQ ID NO: 21899 - RNA, 20 nt, synthetic construct
  source 1..20: mol_type = other RNA
acctatcatactcatcggca

SEQ ID NO: 21900 - RNA, 20 nt, synthetic construct
  source 1..20: mol_type = other RNA
atcatactcatcggcatgga

SEQ ID NO: 21901 - RNA, 20 nt, synthetic construct
  source 1..20: mol_type = other RNA
aatgtggtgataccaatagg

SEQ ID NO: 21902 - RNA, 20 nt, synthetic construct
  source 1..20: mol_type = other RNA
atgtggtgataccaataggt

SEQ ID NO: 21903 - RNA, 20 nt, synthetic construct
  source 1..20: mol_type = other RNA
tatggctgatcatcattccc

SEQ ID NO: 21904 - RNA, 20 nt, synthetic construct
  source 1..20: mol_type = other RNA
gggctgttgatacggcatca

SEQ ID NO: 21905 - RNA, 20 nt, synthetic construct
  source 1..20: mol_type = other RNA
ggctgttgatacggcatcat

SEQ ID NO: 21906 - RNA, 20 nt, synthetic construct
  source 1..20: mol_type = other RNA
catcatgggctgttcgtccg

SEQ ID NO: 21907 - RNA, 20 nt, synthetic construct
  source 1..20: mol_type = other RNA
tcgtccgaggattgttgata

SEQ ID NO: 21908 - RNA, 20 nt, synthetic construct
  source 1..20: mol_type = other RNA
attgttgatacggcaataat

SEQ ID NO: 21909 - RNA, 20 nt, synthetic construct
  source 1..20: mol_type = other RNA
atacggcaataatgggtgca

SEQ ID NO: 21910 - RNA, 20 nt, synthetic construct
  source 1..20: mol_type = other RNA
tacggcaataatgggtgcat

SEQ ID NO: 21911 - RNA, 20 nt, synthetic construct
  source 1..20: mol_type = other RNA
tgcatgggctgctcacgcgg

SEQ ID NO: 21912 - RNA, 20 nt, synthetic construct
  source 1..20: mol_type = other RNA
ctgctgcggcgtaatgagaa

SEQ ID NO: 21913 - RNA, 20 nt, synthetic construct
  source 1..20: mol_type = other RNA
actgctggttaaacgccgca

SEQ ID NO: 21914 - RNA, 20 nt, synthetic construct
  source 1..20: mol_type = other RNA
tacaaaccgtagcacatcta

SEQ ID NO: 21915 - RNA, 20 nt, synthetic construct
  source 1..20: mol_type = other RNA
taagggcattagcagagccg

SEQ ID NO: 21916 - RNA, 20 nt, synthetic construct
  source 1..20: mol_type = other RNA
attagcagagccgcggtgca

SEQ ID NO: 21917 - RNA, 20 nt, synthetic construct
  source 1..20: mol_type = other RNA
ccgcggtgcacggcctgtcg

SEQ ID NO: 21918 - RNA, 20 nt, synthetic construct
  source 1..20: mol_type = other RNA
cgcggtgcacggcctgtcgc

SEQ ID NO: 21919 - RNA, 20 nt, synthetic construct
  source 1..20: mol_type = other RNA
tgctagatattaagcccggt

SEQ ID NO: 21920 - RNA, 20 nt, synthetic construct
  source 1..20: mol_type = other RNA
gcccggtgggtataagatcg

SEQ ID NO: 21921 - RNA, 20 nt, synthetic construct
  source 1..20: mol_type = other RNA
gtataagatcgaggattcca

SEQ ID NO: 21922 - RNA, 20 nt, synthetic construct
  source 1..20: mol_type = other RNA
ctatagccgcgatctcattc

SEQ ID NO: 21923 - RNA, 20 nt, synthetic construct
  source 1..20: mol_type = other RNA
tagccgcgatctcattcagg

SEQ ID NO: 21924 - RNA, 20 nt, synthetic construct
  source 1..20: mol_type = other RNA
cgcgatctcattcaggtggc

SEQ ID NO: 21925 - RNA, 20 nt, synthetic construct
  source 1..20: mol_type = other RNA
gagattggcttcctacaacc

SEQ ID NO: 21926 - RNA, 20 nt, synthetic construct
  source 1..20: mol_type = other RNA
agacccgcgtcaccaccgcc

SEQ ID NO: 21927 - RNA, 20 nt, synthetic construct
  source 1..20: mol_type = other RNA
gccgctgccacatatcaatc

SEQ ID NO: 21928 - RNA, 20 nt, synthetic construct
  source 1..20: mol_type = other RNA
aacgcctgccggatcattat

SEQ ID NO: 21929 - RNA, 20 nt, synthetic construct
  source 1..20: mol_type = other RNA
aaggatgaaactcatactat

SEQ ID NO: 21930 - RNA, 20 nt, synthetic construct
  source 1..20: mol_type = other RNA
ggtattaacaattattcata

SEQ ID NO: 21931 - RNA, 20 nt, synthetic construct
  source 1..20: mol_type = other RNA
ctccagccatacgctggcgc

SEQ ID NO: 21932 - RNA, 20 nt, synthetic construct
  source 1..20: mol_type = other RNA
tccagccatacgctggcgcc

SEQ ID NO: 21933 - RNA, 20 nt, synthetic construct
  source 1..20: mol_type = other RNA
ccatacgctggcgccgggaa

SEQ ID NO: 21934 - RNA, 20 nt, synthetic construct
  source 1..20: mol_type = other RNA
catacgctggcgccgggaaa

SEQ ID NO: 21935 - RNA, 20 nt, synthetic construct
  source 1..20: mol_type = other RNA
ttgattgagttcctctatag

SEQ ID NO: 21936 - RNA, 20 nt, synthetic construct
  source 1..20: mol_type = other RNA
cctctatagaggcaaactca

SEQ ID NO: 21937 - RNA, 20 nt, synthetic construct
  source 1..20: mol_type = other RNA
ctctatagaggcaaactcag

SEQ ID NO: 21938 - RNA, 20 nt, synthetic construct
  source 1..20: mol_type = other RNA
tgatcagcgtgtggttcagc

SEQ ID NO: 21939 - RNA, 20 nt, synthetic construct
  source 1..20: mol_type = other RNA
gatcagcgtgtggttcagcg

SEQ ID NO: 21940 - RNA, 20 nt, synthetic construct
  source 1..20: mol_type = other RNA
tggtaaagctcacgcctgta

SEQ ID NO: 21941 - RNA, 20 nt, synthetic construct
  source 1..20: mol_type = other RNA
gcgaatgtaaacaattgcgc

SEQ ID NO: 21942 - RNA, 20 nt, synthetic construct
  source 1..20: mol_type = other RNA
acgatacggttgagactatt

SEQ ID NO: 21943 - RNA, 20 nt, synthetic construct
  source 1..20: mol_type = other RNA
gcaaccgtaggaacacgcag

SEQ ID NO: 21944 - RNA, 20 nt, synthetic construct
  source 1..20: mol_type = other RNA
tgccgtagctgtagtagtat

SEQ ID NO: 21945 - RNA, 20 nt, synthetic construct
  source 1..20: mol_type = other RNA
gcccttgaaattgtaattgg

SEQ ID NO: 21946 - RNA, 20 nt, synthetic construct
  source 1..20: mol_type = other RNA
tgtaattggagggccgcagc

SEQ ID NO: 21947 - RNA, 20 nt, synthetic construct
  source 1..20: mol_type = other RNA
gtcgacgtaggccctcacca

SEQ ID NO: 21948 - RNA, 20 nt, synthetic construct
  source 1..20: mol_type = other RNA
gtgtacttccagccctccga

SEQ ID NO: 21949 - RNA, 20 nt, synthetic construct
  source 1..20: mol_type = other RNA
tgtacttccagccctccgat

SEQ ID NO: 21950 - RNA, 20 nt, synthetic construct
  source 1..20: mol_type = other RNA
ataatagcaagcggcaatac

SEQ ID NO: 21951 - RNA, 20 nt, synthetic construct
  source 1..20: mol_type = other RNA
aatacaggcacgtagtactc

SEQ ID NO: 21952 - RNA, 20 nt, synthetic construct
  source 1..20: mol_type = other RNA
agtactctggttccgcccgc

SEQ ID NO: 21953 - RNA, 20 nt, synthetic construct
  source 1..20: mol_type = other RNA
ctggccgtcctcaaagacgt

SEQ ID NO: 21954 - RNA, 20 nt, synthetic construct
  source 1..20: mol_type = other RNA
tggccgtcctcaaagacgta

SEQ ID NO: 21955 - RNA, 20 nt, synthetic construct
  source 1..20: mol_type = other RNA
ggccgtcctcaaagacgtag

SEQ ID NO: 21956 - RNA, 20 nt, synthetic construct
  source 1..20: mol_type = other RNA
gagaagccatgagtcctccg

SEQ ID NO: 21957 - RNA, 20 nt, synthetic construct
  source 1..20: mol_type = other RNA
agaagccatgagtcctccgc

SEQ ID NO: 21958 - RNA, 20 nt, synthetic construct
  source 1..20: mol_type = other RNA
cttcctatgcctatgaatac

SEQ ID NO: 21959 - RNA, 20 nt, synthetic construct
  source 1..20: mol_type = other RNA
tgcctatgaatactggatag

SEQ ID NO: 21960 - RNA, 20 nt, synthetic construct
  source 1..20: mol_type = other RNA
ggagcccgggtaatactggg

SEQ ID NO: 21961 - RNA, 20 nt, synthetic construct
  source 1..20: mol_type = other RNA
cgtcattccgtctaagaagt

SEQ ID NO: 21962 - RNA, 20 nt, synthetic construct
  source 1..20: mol_type = other RNA
gttgggaatctgccgctcga

SEQ ID NO: 21963 - RNA, 20 nt, synthetic construct
  source 1..20: mol_type = other RNA
ggcatccagcttgtaagcct

SEQ ID NO: 21964 - RNA, 20 nt, synthetic construct
  source 1..20: mol_type = other RNA
aattcgtcggacactatgaa

SEQ ID NO: 21965 - RNA, 20 nt, synthetic construct
  source 1..20: mol_type = other RNA
cactatgaatggactgcgtc

SEQ ID NO: 21966 - RNA, 20 nt, synthetic construct
  source 1..20: mol_type = other RNA
ttcagtgagcggcaccacgc

SEQ ID NO: 21967 - RNA, 20 nt, synthetic construct
  source 1..20: mol_type = other RNA
tacagtatgattgactaagc

SEQ ID NO: 21968 - RNA, 20 nt, synthetic construct
  source 1..20: mol_type = other RNA
ttcgtacacacgtatcagcg

SEQ ID NO: 21969 - RNA, 20 nt, synthetic construct
  source 1..20: mol_type = other RNA
ctgttcgttgcgcaccatga

SEQ ID NO: 21970 - RNA, 20 nt, synthetic construct
  source 1..20: mol_type = other RNA
gatcatgccgcagaagtcaa

SEQ ID NO: 21971 - RNA, 20 nt, synthetic construct
  source 1..20: mol_type = other RNA
aagtcaaaggagggcccgct

SEQ ID NO: 21972 - RNA, 20 nt, synthetic construct
  source 1..20: mol_type = other RNA
agtcaaaggagggcccgctt

SEQ ID NO: 21973 - RNA, 20 nt, synthetic construct
  source 1..20: mol_type = other RNA
gggtcagtcccgtgcgcaac

SEQ ID NO: 21974 - RNA, 20 nt, synthetic construct
  source 1..20: mol_type = other RNA
ggtcagtcccgtgcgcaaca

SEQ ID NO: 21975 - RNA, 20 nt, synthetic construct
  source 1..20: mol_type = other RNA
tgctaagttcatccttccgc

SEQ ID NO: 21976 - RNA, 20 nt, synthetic construct
  source 1..20: mol_type = other RNA
aagttcatccttccgctggc

SEQ ID NO: 21977 - RNA, 20 nt, synthetic construct
  source 1..20: mol_type = other RNA
tggccggtccattctatgcc

SEQ ID NO: 21978 - RNA, 20 nt, synthetic construct
  source 1..20: mol_type = other RNA
acgaccgccgcaacctgcag

SEQ ID NO: 21979 - RNA, 20 nt, synthetic construct
  source 1..20: mol_type = other RNA
cgaccgccgcaacctgcaga

SEQ ID NO: 21980 - RNA, 20 nt, synthetic construct
  source 1..20: mol_type = other RNA
tgcagagggtgcaggctata

SEQ ID NO: 21981 - RNA, 20 nt, synthetic construct
  source 1..20: mol_type = other RNA
gccgtatgtatcgtgctatt

SEQ ID NO: 21982 - RNA, 20 nt, synthetic construct
  source 1..20: mol_type = other RNA
tgctattaggcgcgctcaac

SEQ ID NO: 21983 - RNA, 20 nt, synthetic construct
  source 1..20: mol_type = other RNA
gctattaggcgcgctcaaca

SEQ ID NO: 21984 - RNA, 20 nt, synthetic construct
  source 1..20: mol_type = other RNA
cttatcattgtaataaatgg

SEQ ID NO: 21985 - RNA, 20 nt, synthetic construct
  source 1..20: mol_type = other RNA
ttcccacgtaggccgcgcat

SEQ ID NO: 21986 - RNA, 20 nt, synthetic construct
  source 1..20: mol_type = other RNA
cacgtaggccgcgcattggc

SEQ ID NO: 21987 - RNA, 20 nt, synthetic construct
  source 1..20: mol_type = other RNA
gcaggcgcgaagataaatcc

SEQ ID NO: 21988 - RNA, 20 nt, synthetic construct
  source 1..20: mol_type = other RNA
ggcgcgaagataaatccagg

SEQ ID NO: 21989 - RNA, 20 nt, synthetic construct
  source 1..20: mol_type = other RNA
gctccgcgtaccctagttcc

SEQ ID NO: 21990 - RNA, 20 nt, synthetic construct
  source 1..20: mol_type = other RNA
taccctagttcctggtatac

SEQ ID NO: 21991 - RNA, 20 nt, synthetic construct
  source 1..20: mol_type = other RNA
gctcaatgatatctaggcgc

SEQ ID NO: 21992 - RNA, 20 nt, synthetic construct
  source 1..20: mol_type = other RNA
gccgtcggcggtggtaagaa

SEQ ID NO: 21993 - RNA, 20 nt, synthetic construct
  source 1..20: mol_type = other RNA
ggcccactgcgaatgcacca

SEQ ID NO: 21994 - RNA, 20 nt, synthetic construct
  source 1..20: mol_type = other RNA
gagcttcagcccgacgccgt

SEQ ID NO: 21995 - RNA, 20 nt, synthetic construct
  source 1..20: mol_type = other RNA
ggccttattgatgttcgttc

SEQ ID NO: 21996 - RNA, 20 nt, synthetic construct
  source 1..20: mol_type = other RNA
gggaacatacacatcgcgct

SEQ ID NO: 21997 - RNA, 20 nt, synthetic construct
  source 1..20: mol_type = other RNA
atcgcgcttggcgataagac

SEQ ID NO: 21998 - RNA, 20 nt, synthetic construct
  source 1..20: mol_type = other RNA
cgccataaggtcctcatctt

SEQ ID NO: 21999 - RNA, 20 nt, synthetic construct
  source 1..20: mol_type = other RNA
aaacttatacatgtcttcgt

SEQ ID NO: 22000 - RNA, 20 nt, synthetic construct
  source 1..20: mol_type = other RNA
gtcttcgtcggtaatcctag

SEQ ID NO: 22001 - RNA, 20 nt, synthetic construct
  source 1..20: mol_type = other RNA
gggcgtatgacacgttgtcg

SEQ ID NO: 22002 - RNA, 20 nt, synthetic construct
  source 1..20: mol_type = other RNA
cgaccgctggtgacgaatgt

SEQ ID NO: 22003 - RNA, 20 nt, synthetic construct
  source 1..20: mol_type = other RNA
ccgttccatccagcgaataa

SEQ ID NO: 22004 - RNA, 20 nt, synthetic construct
  source 1..20: mol_type = other RNA
cgttccatccagcgaataac

SEQ ID NO: 22005 - RNA, 20 nt, synthetic construct
  source 1..20: mol_type = other RNA
atccagcgaataacgggacc

SEQ ID NO: 22006 - RNA, 20 nt, synthetic construct
  source 1..20: mol_type = other RNA
tccagcgaataacgggacct

SEQ ID NO: 22007 - RNA, 20 nt, synthetic construct
  source 1..20: mol_type = other RNA
cagcgaataacgggacctgg

SEQ ID NO: 22008 - RNA, 20 nt, synthetic construct
  source 1..20: mol_type = other RNA
agcgaataacgggacctggg

SEQ ID NO: 22009 - RNA, 20 nt, synthetic construct
  source 1..20: mol_type = other RNA
acgcatccgaaggtgttaca

SEQ ID NO: 22010 - RNA, 20 nt, synthetic construct
  source 1..20: mol_type = other RNA
ttgttgcgcataggccttca

SEQ ID NO: 22011 - RNA, 20 nt, synthetic construct
  source 1..20: mol_type = other RNA
ttgcgcataggccttcacgg

SEQ ID NO: 22012 - RNA, 20 nt, synthetic construct
  source 1..20: mol_type = other RNA
tgcgcataggccttcacggc

SEQ ID NO: 22013 - RNA, 20 nt, synthetic construct
  source 1..20: mol_type = other RNA
gcgcataggccttcacggcg

SEQ ID NO: 22014 - RNA, 20 nt, synthetic construct
  source 1..20: mol_type = other RNA
gtctgttgtggtcggaggcg

SEQ ID NO: 22015 - RNA, 20 nt, synthetic construct
  source 1..20: mol_type = other RNA
ggagtactctctgaataact

SEQ ID NO: 22016 - RNA, 20 nt, synthetic construct
  source 1..20: mol_type = other RNA
ctgcgaatacatcatgcccg

SEQ ID NO: 22017 - RNA, 20 nt, synthetic construct
  source 1..20: mol_type = other RNA
ggcagacatgatccaccacg

SEQ ID NO: 22018 - RNA, 20 nt, synthetic construct
  source 1..20: mol_type = other RNA
gcttaaacatattcgccaat

SEQ ID NO: 22019 - RNA, 20 nt, synthetic construct
  source 1..20: mol_type = other RNA
gcatgctattcgtcgcactc

SEQ ID NO: 22020 - RNA, 20 nt, synthetic construct
  source 1..20: mol_type = other RNA
tgctattcgtcgcactcagg

SEQ ID NO: 22021 - RNA, 20 nt, synthetic construct
  source 1..20: mol_type = other RNA
gctattcgtcgcactcaggt

SEQ ID NO: 22022 - RNA, 20 nt, synthetic construct
  source 1..20: mol_type = other RNA
attcgtcgcactcaggtggg

SEQ ID NO: 22023 - RNA, 20 nt, synthetic construct
  source 1..20: mol_type = other RNA
tgaaccgcgctgcttgtagc

SEQ ID NO: 22024 - RNA, 20 nt, synthetic construct
  source 1..20: mol_type = other RNA
gaaccgcgctgcttgtagct

SEQ ID NO: 22025 - RNA, 20 nt, synthetic construct
  source 1..20: mol_type = other RNA
tgggatacactcaacagtcc

SEQ ID NO: 22026 - RNA, 20 nt, synthetic construct
  source 1..20: mol_type = other RNA
tatatgccgcaaatacaatc

SEQ ID NO: 22027 - RNA, 20 nt, synthetic construct
  source 1..20: mol_type = other RNA
ctctatgggcatctacgtcg

SEQ ID NO: 22028 - RNA, 20 nt, synthetic construct
  source 1..20: mol_type = other RNA
gtgtgcggcattcatcagct

SEQ ID NO: 22029 - RNA, 20 nt, synthetic construct
  source 1..20: mol_type = other RNA
agtccatgctcccgcttgcc

SEQ ID NO: 22030 - RNA, 20 nt, synthetic construct
  source 1..20: mol_type = other RNA
catcacgatctgctctacac

SEQ ID NO: 22031 - RNA, 20 nt, synthetic construct
  source 1..20: mol_type = other RNA
gtgtcccgaaatgccaaatg

SEQ ID NO: 22032 - RNA, 20 nt, synthetic construct
  source 1..20: mol_type = other RNA
taaagcctcgccatctccca

SEQ ID NO: 22033 - RNA, 20 nt, synthetic construct
  source 1..20: mol_type = other RNA
agcgtgcatagctgtctctg

SEQ ID NO: 22034 - RNA, 20 nt, synthetic construct
  source 1..20: mol_type = other RNA
tgggaatgttaatgcagaac

SEQ ID NO: 22035 - RNA, 20 nt, synthetic construct
  source 1..20: mol_type = other RNA
gaatgttaatgcagaacagg

SEQ ID NO: 22036 - RNA, 20 nt, synthetic construct
  source 1..20: mol_type = other RNA
gcgttctcatgtcgcctccg

SEQ ID NO: 22037 - RNA, 20 nt, synthetic construct
  source 1..20: mol_type = other RNA
tcataacctgtcaacccgcg

SEQ ID NO: 22038 - RNA, 20 nt, synthetic construct
  source 1..20: mol_type = other RNA
cataacctgtcaacccgcga

SEQ ID NO: 22039 - RNA, 20 nt, synthetic construct
  source 1..20: mol_type = other RNA
catacgatcgccagatatcc

SEQ ID NO: 22040 - RNA, 20 nt, synthetic construct
  source 1..20: mol_type = other RNA
ggaacaactgcgattcttct

SEQ ID NO: 22041 - RNA, 20 nt, synthetic construct
  source 1..20: mol_type = other RNA
gcagcagttggcgcgaagaa

SEQ ID NO: 22042 - RNA, 20 nt, synthetic construct
  source 1..20: mol_type = other RNA
attaaactggcagaccggga

SEQ ID NO: 22043 - RNA, 20 nt, synthetic construct
  source 1..20: mol_type = other RNA
aggaggtcgctgagctacac

SEQ ID NO: 22044 - RNA, 20 nt, synthetic construct
  source 1..20: mol_type = other RNA
gcaccacgtcggttgaatca

SEQ ID NO: 22045 - RNA, 20 nt, synthetic construct
  source 1..20: mol_type = other RNA
ttgaatcacggcatctaaat

SEQ ID NO: 22046 - RNA, 20 nt, synthetic construct
  source 1..20: mol_type = other RNA
atcagcgaggccgagacaaa

SEQ ID NO: 22047 - RNA, 20 nt, synthetic construct
  source 1..20: mol_type = other RNA
cgagacaaacggcctcatcc

SEQ ID NO: 22048 - RNA, 20 nt, synthetic construct
  source 1..20: mol_type = other RNA
atgtcggcaacgcccgtaac

SEQ ID NO: 22049 - RNA, 20 nt, synthetic construct
  source 1..20: mol_type = other RNA
tgtcggcaacgcccgtaacc

SEQ ID NO: 22050 - RNA, 20 nt, synthetic construct
  source 1..20: mol_type = other RNA
ccgcggcatgagctgcccaa

SEQ ID NO: 22051 - RNA, 20 nt, synthetic construct
  source 1..20: mol_type = other RNA
gcagtgggcattccgttaaa

SEQ ID NO: 22052 - RNA, 20 nt, synthetic construct
  source 1..20: mol_type = other RNA
tggaaagactcagcaccgga

SEQ ID NO: 22053 - RNA, 20 nt, synthetic construct
  source 1..20: mol_type = other RNA
ggaaagactcagcaccggaa

SEQ ID NO: 22054 - RNA, 20 nt, synthetic construct
  source 1..20: mol_type = other RNA
caaacggaacccaaggctta

SEQ ID NO: 22055 - RNA, 20 nt, synthetic construct
  source 1..20: mol_type = other RNA
ggcaagcacagactggcttc

SEQ ID NO: 22056 - RNA, 20 nt, synthetic construct
  source 1..20: mol_type = other RNA
gcagccaccaacgcacatct

SEQ ID NO: 22057 - RNA, 20 nt, synthetic construct
  source 1..20: mol_type = other RNA
cagccaccaacgcacatctc

SEQ ID NO: 22058 - RNA, 20 nt, synthetic construct
  source 1..20: mol_type = other RNA
accaacgcacatctcgggat

SEQ ID NO: 22059 - RNA, 20 nt, synthetic construct
  source 1..20: mol_type = other RNA
ttccattattcggcaaggcc

SEQ ID NO: 22060 - RNA, 20 nt, synthetic construct
  source 1..20: mol_type = other RNA
tccattattcggcaaggccg

SEQ ID NO: 22061 - RNA, 20 nt, synthetic construct
  source 1..20: mol_type = other RNA
ccattattcggcaaggccgg

SEQ ID NO: 22062 - RNA, 20 nt, synthetic construct
  source 1..20: mol_type = other RNA
ccacaatcgggtccgcatgt

SEQ ID NO: 22063 - RNA, 20 nt, synthetic construct
  source 1..20: mol_type = other RNA
cacaatcgggtccgcatgtc

SEQ ID NO: 22064 - RNA, 20 nt, synthetic construct
  source 1..20: mol_type = other RNA
acaatcgggtccgcatgtcg

SEQ ID NO: 22065 - RNA, 20 nt, synthetic construct
  source 1..20: mol_type = other RNA
caatcgggtccgcatgtcgg

SEQ ID NO: 22066 - RNA, 20 nt, synthetic construct
  source 1..20: mol_type = other RNA
cgctgtacgcgaacgaagcc

SEQ ID NO: 22067 - RNA, 20 nt, synthetic construct
  source 1..20: mol_type = other RNA
aacgcctcgtccaacctgga

SEQ ID NO: 22068 - RNA, 20 nt, synthetic construct
  source 1..20: mol_type = other RNA
caccagctgcgtattctcat

SEQ ID NO: 22069 - RNA, 20 nt, synthetic construct
  source 1..20: mol_type = other RNA
gcgtattctcatcgggtcca

SEQ ID NO: 22070 - RNA, 20 nt, synthetic construct
  source 1..20: mol_type = other RNA
catcgggtccaaggtgattg

SEQ ID NO: 22071 - RNA, 20 nt, synthetic construct
  source 1..20: mol_type = other RNA
cgggtccaaggtgattgtgg

SEQ ID NO: 22072 - RNA, 20 nt, synthetic construct
  source 1..20: mol_type = other RNA
tacgtatcgacaacacccga

SEQ ID NO: 22073 - RNA, 20 nt, synthetic construct
  source 1..20: mol_type = other RNA
gtatcgacaacacccgatgg

SEQ ID NO: 22074 - RNA, 20 nt, synthetic construct
  source 1..20: mol_type = other RNA
tatcgacaacacccgatgga

SEQ ID NO: 22075 - RNA, 20 nt, synthetic construct
  source 1..20: mol_type = other RNA
ctgcgaaagcacgccattga

SEQ ID NO: 22076 - RNA, 20 nt, synthetic construct
  source 1..20: mol_type = other RNA
tgcgaaagcacgccattgat

SEQ ID NO: 22077 - RNA, 20 nt, synthetic construct
  source 1..20: mol_type = other RNA
taagattgataagcctatgc

SEQ ID NO: 22078 - RNA, 20 nt, synthetic construct
  source 1..20: mol_type = other RNA
ccttagtccatccatcacgc

SEQ ID NO: 22079 - RNA, 20 nt, synthetic construct
  source 1..20: mol_type = other RNA
tccatcacgccggcaaacgt

SEQ ID NO: 22080 - RNA, 20 nt, synthetic construct
  source 1..20: mol_type = other RNA
tgtggacgtactccgagcta

SEQ ID NO: 22081 - RNA, 20 nt, synthetic construct
  source 1..20: mol_type = other RNA
gacgtactccgagctatgga

SEQ ID NO: 22082 - RNA, 20 nt, synthetic construct
  source 1..20: mol_type = other RNA
tccacgcccaagctcataca

SEQ ID NO: 22083 - RNA, 20 nt, synthetic construct
  source 1..20: mol_type = other RNA
ctcagaggacaacttcgcgc

SEQ ID NO: 22084 - RNA, 20 nt, synthetic construct
  source 1..20: mol_type = other RNA
tcaggatgagccaatggagc

SEQ ID NO: 22085 - RNA, 20 nt, synthetic construct
  source 1..20: mol_type = other RNA
cttattatagataatcttgc

SEQ ID NO: 22086 - RNA, 20 nt, synthetic construct
  source 1..20: mol_type = other RNA
tatagataatcttgcaggta

SEQ ID NO: 22087 - RNA, 20 nt, synthetic construct
  source 1..20: mol_type = other RNA
atagataatcttgcaggtat

SEQ ID NO: 22088 - RNA, 20 nt, synthetic construct
  source 1..20: mol_type = other RNA
tagataatcttgcaggtatg

SEQ ID NO: 22089 - RNA, 20 nt, synthetic construct
  source 1..20: mol_type = other RNA
agataatcttgcaggtatgg

SEQ ID NO: 22090 - RNA, 20 nt, synthetic construct
  source 1..20: mol_type = other RNA
cactctggtgggctatgcca

SEQ ID NO: 22091 - RNA, 20 nt, synthetic construct
  source 1..20: mol_type = other RNA
tctggtgggctatgccacgg

SEQ ID NO: 22092 - RNA, 20 nt, synthetic construct
  source 1..20: mol_type = other RNA
cgacattgtcataggctata

SEQ ID NO: 22093 - RNA, 20 nt, synthetic construct
  source 1..20: mol_type = other RNA
ctgatattcgcatgctaaac

SEQ ID NO: 22094 - RNA, 20 nt, synthetic construct
  source 1..20: mol_type = other RNA
gatattcgcatgctaaaccg

SEQ ID NO: 22095 - RNA, 20 nt, synthetic construct
  source 1..20: mol_type = other RNA
ggagccgtatgcgaaacacg

SEQ ID NO: 22096 - RNA, 20 nt, synthetic construct
  source 1..20: mol_type = other RNA
ccgtatgcgaaacacgcgga

SEQ ID NO: 22097 - RNA, 20 nt, synthetic construct
  source 1..20: mol_type = other RNA
cgtatgcgaaacacgcggac

SEQ ID NO: 22098 - RNA, 20 nt, synthetic construct
  source 1..20: mol_type = other RNA
atgcgaaacacgcggacggg

SEQ ID NO: 22099 - RNA, 20 nt, synthetic construct
  source 1..20: mol_type = other RNA
gaatgcaggatggaatccgc

SEQ ID NO: 22100 - RNA, 20 nt, synthetic construct
  source 1..20: mol_type = other RNA
attatgcgtacgaataatag

SEQ ID NO: 22101 - RNA, 20 nt, synthetic construct
  source 1..20: mol_type = other RNA
cgtacgaataatagcggaag

SEQ ID NO: 22102 - RNA, 20 nt, synthetic construct
  source 1..20: mol_type = other RNA
agcagcgtgtactatatacc

SEQ ID NO: 22103 - RNA, 20 nt, synthetic construct
  source 1..20: mol_type = other RNA
ctatatacctggcagacaac

SEQ ID NO: 22104 - RNA, 20 nt, synthetic construct
  source 1..20: mol_type = other RNA
gacaacaggccagtgccacg

SEQ ID NO: 22105 - RNA, 20 nt, synthetic construct
  source 1..20: mol_type = other RNA
ttcagtctatcacgtgcaag

SEQ ID NO: 22106 - RNA, 20 nt, synthetic construct
  source 1..20: mol_type = other RNA
cgtgcaagaggagcttacac

SEQ ID NO: 22107 - RNA, 20 nt, synthetic construct
  source 1..20: mol_type = other RNA
ctatacctactctataagct

SEQ ID NO: 22108 - RNA, 20 nt, synthetic construct
  source 1..20: mol_type = other RNA
tctccttaagtcctcgccat

SEQ ID NO: 22109 - RNA, 20 nt, synthetic construct
  source 1..20: mol_type = other RNA
taagacgattgaatatcaaa

SEQ ID NO: 22110 - RNA, 20 nt, synthetic construct
  source 1..20: mol_type = other RNA
agaacatgttatcctcacgg

SEQ ID NO: 22111 - RNA, 20 nt, synthetic construct
  source 1..20: mol_type = other RNA
atcctcacggaggataacca

SEQ ID NO: 22112 - RNA, 20 nt, synthetic construct
  source 1..20: mol_type = other RNA
ttaaatgcaggcccgatcat

SEQ ID NO: 22113 - RNA, 20 nt, synthetic construct
  source 1..20: mol_type = other RNA
caggcccgatcataggctcc

SEQ ID NO: 22114 - RNA, 20 nt, synthetic construct
  source 1..20: mol_type = other RNA
gtaatattcgcgggtaatcc

SEQ ID NO: 22115 - RNA, 20 nt, synthetic construct
  source 1..20: mol_type = other RNA
ttcttcttcaaactcccgta

SEQ ID NO: 22116 - RNA, 20 nt, synthetic construct
  source 1..20: mol_type = other RNA
ttcaaactcccgtatggcac

SEQ ID NO: 22117 - RNA, 20 nt, synthetic construct
  source 1..20: mol_type = other RNA
aggtccgactcatcttcctt

SEQ ID NO: 22118 - RNA, 20 nt, synthetic construct
  source 1..20: mol_type = other RNA
tcttccttcggcttaccctt

SEQ ID NO: 22119 - RNA, 20 nt, synthetic construct
  source 1..20: mol_type = other RNA
tagaagtcgccattgctgaa

SEQ ID NO: 22120 - RNA, 20 nt, synthetic construct
  source 1..20: mol_type = other RNA
cgccattgctgaagggtaac

SEQ ID NO: 22121 - RNA, 20 nt, synthetic construct
  source 1..20: mol_type = other RNA
taagacctgttctcccaaca

SEQ ID NO: 22122 - RNA, 20 nt, synthetic construct
  source 1..20: mol_type = other RNA
gacctgttctcccaacatgg

SEQ ID NO: 22123 - RNA, 20 nt, synthetic construct
  source 1..20: mol_type = other RNA
gcttatggcacagaacggcc

SEQ ID NO: 22124 - RNA, 20 nt, synthetic construct
  source 1..20: mol_type = other RNA
tcataagatagtgaataaac

SEQ ID NO: 22125 - RNA, 20 nt, synthetic construct
  source 1..20: mol_type = other RNA
ccttgggaaacccgtaaatt

SEQ ID NO: 22126 - RNA, 20 nt, synthetic construct
  source 1..20: mol_type = other RNA
ttgatgcaacacgtaaatgt

SEQ ID NO: 22127 - RNA, 20 nt, synthetic construct
  source 1..20: mol_type = other RNA
tggtagcgtgcttgtgctgt

SEQ ID NO: 22128 - RNA, 20 nt, synthetic construct
  source 1..20: mol_type = other RNA
ggtagcgtgcttgtgctgtc

SEQ ID NO: 22129 - RNA, 20 nt, synthetic construct
  source 1..20: mol_type = other RNA
ataaacaagctccgcgagcg

SEQ ID NO: 22130 - RNA, 20 nt, synthetic construct
  source 1..20: mol_type = other RNA
caagctccgcgagcgcggtt

SEQ ID NO: 22131 - RNA, 20 nt, synthetic construct
  source 1..20: mol_type = other RNA
tattccaagatcgataaccc

SEQ ID NO: 22132 - RNA, 20 nt, synthetic construct
  source 1..20: mol_type = other RNA
cggcgaagtacattccagaa

SEQ ID NO: 22133 - RNA, 20 nt, synthetic construct
  source 1..20: mol_type = other RNA
atagttaagccatgtgagtt

SEQ ID NO: 22134 - RNA, 20 nt, synthetic construct
  source 1..20: mol_type = other RNA
tccgatggctgaaactgtac

SEQ ID NO: 22135 - RNA, 20 nt, synthetic construct
  source 1..20: mol_type = other RNA
gcctacaaatagtagatgca

SEQ ID NO: 22136 - RNA, 20 nt, synthetic construct
  source 1..20: mol_type = other RNA
aaagtctaatgtgttatccc

SEQ ID NO: 22137 - RNA, 20 nt, synthetic construct
  source 1..20: mol_type = other RNA
tgatgccatcaatagaatat

SEQ ID NO: 22138 - RNA, 20 nt, synthetic construct
  source 1..20: mol_type = other RNA
gcacttgttagcgaaataaa

SEQ ID NO: 22139 - RNA, 20 nt, synthetic construct
  source 1..20: mol_type = other RNA
tggtacctaggctgtatagc

SEQ ID NO: 22140 - RNA, 20 nt, synthetic construct
  source 1..20: mol_type = other RNA
gtccgttacatagtagccaa

SEQ ID NO: 22141 - RNA, 20 nt, synthetic construct
  source 1..20: mol_type = other RNA
tccgttacatagtagccaac

SEQ ID NO: 22142 - RNA, 20 nt, synthetic construct
  source 1..20: mol_type = other RNA
gttacatagtagccaacggg

SEQ ID NO: 22143 - RNA, 20 nt, synthetic construct
  source 1..20: mol_type = other RNA
caatgaattcaatggcctgg

SEQ ID NO: 22144 - RNA, 20 nt, synthetic construct
  source 1..20: mol_type = other RNA
gctgttagcattaaatggtt

SEQ ID NO: 22145 - RNA, 20 nt, synthetic construct
  source 1..20: mol_type = other RNA
ttataacatctgccgccgtt

SEQ ID NO: 22146 - RNA, 20 nt, synthetic construct
  source 1..20: mol_type = other RNA
tataacatctgccgccgtta

SEQ ID NO: 22147 - RNA, 20 nt, synthetic construct
  source 1..20: mol_type = other RNA
atctgccgccgttagggatt

SEQ ID NO: 22148 - RNA, 20 nt, synthetic construct
  source 1..20: mol_type = other RNA
tctgccgccgttagggattc

SEQ ID NO: 22149 - RNA, 20 nt, synthetic construct
  source 1..20: mol_type = other RNA
tgccacaacggtagtccacc

SEQ ID NO: 22150 - RNA, 20 nt, synthetic construct
  source 1..20: mol_type = other RNA
ggtagtccaccaggcattca

SEQ ID NO: 22151 - RNA, 20 nt, synthetic construct
  source 1..20: mol_type = other RNA
atcgtgcagcgcaagcgcaa

SEQ ID NO: 22152 - RNA, 20 nt, synthetic construct
  source 1..20: mol_type = other RNA
gcgcaatggcgttcgagctg

SEQ ID NO: 22153 - RNA, 20 nt, synthetic construct
  source 1..20: mol_type = other RNA
cattctcttgtattcgcgca

SEQ ID NO: 22154 - RNA, 20 nt, synthetic construct
  source 1..20: mol_type = other RNA
cttgtattcgcgcacggaaa

SEQ ID NO: 22155 - RNA, 20 nt, synthetic construct
  source 1..20: mol_type = other RNA
tatagacgtgagagtatatt

SEQ ID NO: 22156 - RNA, 20 nt, synthetic construct
  source 1..20: mol_type = other RNA
tacaccgcaaacctctgcaa

SEQ ID NO: 22157 - RNA, 20 nt, synthetic construct
  source 1..20: mol_type = other RNA
caaacctctgcaatggatcg

SEQ ID NO: 22158 - RNA, 20 nt, synthetic construct
  source 1..20: mol_type = other RNA
aaacctctgcaatggatcgc

SEQ ID NO: 22159 - RNA, 20 nt, synthetic construct
  source 1..20: mol_type = other RNA
aacctctgcaatggatcgcg

SEQ ID NO: 22160 - RNA, 20 nt, synthetic construct
  source 1..20: mol_type = other RNA
tagcgtgaagaatgtggatg

SEQ ID NO: 22161 - RNA, 20 nt, synthetic construct
  source 1..20: mol_type = other RNA
ggatgaggcccttaggctta

SEQ ID NO: 22162 - RNA, 20 nt, synthetic construct
  source 1..20: mol_type = other RNA
gccatcgtacgcaatgccaa

SEQ ID NO: 22163 - RNA, 20 nt, synthetic construct
  source 1..20: mol_type = other RNA
ccatcgtacgcaatgccaat

SEQ ID NO: 22164 - RNA, 20 nt, synthetic construct
  source 1..20: mol_type = other RNA
tgccaatgggccctatgagc

SEQ ID NO: 22165 - RNA, 20 nt, synthetic construct
  source 1..20: mol_type = other RNA
gccaatgggccctatgagcc

SEQ ID NO: 22166 - RNA, 20 nt, synthetic construct
  source 1..20: mol_type = other RNA
cctcttcaggcccgtgcggt

SEQ ID NO: 22167 - RNA, 20 nt, synthetic construct
  source 1..20: mol_type = other RNA
gccgttcagttcaatattgc

SEQ ID NO: 22168 - RNA, 20 nt, synthetic construct
  source 1..20: mol_type = other RNA
gacaatgaccataagaggca

SEQ ID NO: 22169 - RNA, 20 nt, synthetic construct
  source 1..20: mol_type = other RNA
gggcacccttcccgccgagg

SEQ ID NO: 22170 - RNA, 20 nt, synthetic construct
  source 1..20: mol_type = other RNA
gggtatctatgatgcgcgaa

SEQ ID NO: 22171 - RNA, 20 nt, synthetic construct
  source 1..20: mol_type = other RNA
ggtatctatgatgcgcgaat

SEQ ID NO: 22172 - RNA, 20 nt, synthetic construct
  source 1..20: mol_type = other RNA
acaccagcgcaagcaatgta

SEQ ID NO: 22173 - RNA, 20 nt, synthetic construct
  source 1..20: mol_type = other RNA
caccagcgcaagcaatgtat

SEQ ID NO: 22174 - RNA, 20 nt, synthetic construct
  source 1..20: mol_type = other RNA
agcaatgtatgggacaccct

SEQ ID NO: 22175 - RNA, 20 nt, synthetic construct
  source 1..20: mol_type = other RNA
tcatcgccgaaatacgacga

SEQ ID NO: 22176 - RNA, 20 nt, synthetic construct
  source 1..20: mol_type = other RNA
ccgaaatacgacgatggtta

SEQ ID NO: 22177 - RNA, 20 nt, synthetic construct
  source 1..20: mol_type = other RNA
cgaaatacgacgatggttaa

SEQ ID NO: 22178 - RNA, 20 nt, synthetic construct
  source 1..20: mol_type = other RNA
agggttatatgcctcaactg

SEQ ID NO: 22179 - RNA, 20 nt, synthetic construct
  source 1..20: mol_type = other RNA
gggttatatgcctcaactgc

SEQ ID NO: 22180 - RNA, 20 nt, synthetic construct
  source 1..20: mol_type = other RNA
gcctaagcgtcttattgaag

SEQ ID NO: 22181 - RNA, 20 nt, synthetic construct
  source 1..20: mol_type = other RNA
gcggcttcaagccaaaccga

SEQ ID NO: 22182 - RNA, 20 nt, synthetic construct
  source 1..20: mol_type = other RNA
aaagcagtgctacgtctgta

SEQ ID NO: 22183 - RNA, 20 nt, synthetic construct
  source 1..20: mol_type = other RNA
catacgacctggcatcagat

SEQ ID NO: 22184 - RNA, 20 nt, synthetic construct
  source 1..20: mol_type = other RNA
atacgacctggcatcagatt

SEQ ID NO: 22185 - RNA, 20 nt, synthetic construct
  source 1..20: mol_type = other RNA
atcagattgggaatcgggtc

SEQ ID NO: 22186 - RNA, 20 nt, synthetic construct
  source 1..20: mol_type = other RNA
taataacgtgatccagtatc

SEQ ID NO: 22187 - RNA, 20 nt, synthetic construct
  source 1..20: mol_type = other RNA
aaagaatctgctgatcccga

SEQ ID NO: 22188 - RNA, 20 nt, synthetic construct
  source 1..20: mol_type = other RNA
aaggacctacaaatcgtgcg

SEQ ID NO: 22189 - RNA, 20 nt, synthetic construct
  source 1..20: mol_type = other RNA
accgcaacccagggaggcac

SEQ ID NO: 22190 - RNA, 20 nt, synthetic construct
  source 1..20: mol_type = other RNA
ggaaagcgtgggatcgtcat

SEQ ID NO: 22191 - RNA, 20 nt, synthetic construct
  source 1..20: mol_type = other RNA
aaagcgtgggatcgtcatgg

SEQ ID NO: 22192 - RNA, 20 nt, synthetic construct
  source 1..20: mol_type = other RNA
gcgaagacttcctcgcaagg

SEQ ID NO: 22193 - RNA, 20 nt, synthetic construct
  source 1..20: mol_type = other RNA
cgaagacttcctcgcaagga

SEQ ID NO: 22194 - RNA, 20 nt, synthetic construct
  source 1..20: mol_type = other RNA
agaattcgtaaatccctact

SEQ ID NO: 22195 - RNA, 20 nt, synthetic construct
  source 1..20: mol_type = other RNA
gccaggtatggtcgatcagc

SEQ ID NO: 22196 - RNA, 20 nt, synthetic construct
  source 1..20: mol_type = other RNA
tgcacgaacgctgcaagttg

SEQ ID NO: 22197 - RNA, 20 nt, synthetic construct
  source 1..20: mol_type = other RNA
acaatccgttcacgatattg

SEQ ID NO: 22198 - RNA, 20 nt, synthetic construct
  source 1..20: mol_type = other RNA
caatccgttcacgatattga

SEQ ID NO: 22199 - RNA, 20 nt, synthetic construct
  source 1..20: mol_type = other RNA
tctctcgaacgaagcagcat

SEQ ID NO: 22200 - RNA, 20 nt, synthetic construct
  source 1..20: mol_type = other RNA
ctctcgaacgaagcagcata

SEQ ID NO: 22201 - RNA, 20 nt, synthetic construct
  source 1..20: mol_type = other RNA
tctcgaacgaagcagcatag

SEQ ID NO: 22202 - RNA, 20 nt, synthetic construct
  source 1..20: mol_type = other RNA
cgcatgtgcctggtataatg

SEQ ID NO: 22203 - RNA, 20 nt, synthetic construct
  source 1..20: mol_type = other RNA
gagcgtcatgagccgcgttg

SEQ ID NO: 22204 - RNA, 20 nt, synthetic construct
  source 1..20: mol_type = other RNA
aagagttcgggtcccgttaa

SEQ ID NO: 22205 - RNA, 20 nt, synthetic construct
  source 1..20: mol_type = other RNA
ttcgggtcccgttaatgggc

SEQ ID NO: 22206 - RNA, 20 nt, synthetic construct
  source 1..20: mol_type = other RNA
atgaacaaactgcacgccat

SEQ ID NO: 22207 - RNA, 20 nt, synthetic construct
  source 1..20: mol_type = other RNA
ctacatgcattataacaagc

SEQ ID NO: 22208 - RNA, 20 nt, synthetic construct
  source 1..20: mol_type = other RNA
cgcaacggcgaactcattga

SEQ ID NO: 22209 - RNA, 20 nt, synthetic construct
  source 1..20: mol_type = other RNA
gcgtagatatgggccgcagc

SEQ ID NO: 22210 - RNA, 20 nt, synthetic construct
  source 1..20: mol_type = other RNA
ctgaactacgtgcgcaacgc

SEQ ID NO: 22211 - RNA, 20 nt, synthetic construct
  source 1..20: mol_type = other RNA
cgccggattcacagtgtcca

SEQ ID NO: 22212 - RNA, 20 nt, synthetic construct
  source 1..20: mol_type = other RNA
ggccgacatgctcctaaccc

SEQ ID NO: 22213 - RNA, 20 nt, synthetic construct
  source 1..20: mol_type = other RNA
taaactgctgcttgagtcgg

SEQ ID NO: 22214 - RNA, 20 nt, synthetic construct
  source 1..20: mol_type = other RNA
ataaacaaccggctgcttca

SEQ ID NO: 22215 - RNA, 20 nt, synthetic construct
  source 1..20: mol_type = other RNA
tccattaatccggaaaccaa

SEQ ID NO: 22216 - RNA, 20 nt, synthetic construct
  source 1..20: mol_type = other RNA
caatatgattcacatcatgg

SEQ ID NO: 22217 - RNA, 20 nt, synthetic construct
  source 1..20: mol_type = other RNA
attcacatcatggcgggcat

SEQ ID NO: 22218 - RNA, 20 nt, synthetic construct
  source 1..20: mol_type = other RNA
atctgcaacagctatattgc

SEQ ID NO: 22219 - RNA, 20 nt, synthetic construct
  source 1..20: mol_type = other RNA
gccaaccgtaaagccatctt

SEQ ID NO: 22220 - RNA, 20 nt, synthetic construct
  source 1..20: mol_type = other RNA
tattgtggattattaccgac

SEQ ID NO: 22221 - RNA, 20 nt, synthetic construct
  source 1..20: mol_type = other RNA
cgtcttgtgcagcagttgta

SEQ ID NO: 22222 - RNA, 20 nt, synthetic construct
  source 1..20: mol_type = other RNA
tgtgcagcagttgtacggag

SEQ ID NO: 22223 - RNA, 20 nt, synthetic construct
  source 1..20: mol_type = other RNA
cacgccagctcgaaaccgta

SEQ ID NO: 22224 - RNA, 20 nt, synthetic construct
  source 1..20: mol_type = other RNA
aaccatcatgctgtcggacc

SEQ ID NO: 22225 - RNA, 20 nt, synthetic construct
  source 1..20: mol_type = other RNA
gaggacaaattcaagtacac

SEQ ID NO: 22226 - RNA, 20 nt, synthetic construct
  source 1..20: mol_type = other RNA
aggacaaattcaagtacacc

SEQ ID NO: 22227 - RNA, 20 nt, synthetic construct
  source 1..20: mol_type = other RNA
tagacaggtgccggtaaacg

SEQ ID NO: 22228 - RNA, 20 nt, synthetic construct
  source 1..20: mol_type = other RNA
catgcttattcgcatcgaac

SEQ ID NO: 22229 - RNA, 20 nt, synthetic construct
  source 1..20: mol_type = other RNA
cgagcagatgagtgccatcc

SEQ ID NO: 22230 - RNA, 20 nt, synthetic construct
  source 1..20: mol_type = other RNA
gtgccatcctggacctcata

SEQ ID NO: 22231 - RNA, 20 nt, synthetic construct
  source 1..20: mol_type = other RNA
aagtcttattaactacggtg

SEQ ID NO: 22232 - RNA, 20 nt, synthetic construct
  source 1..20: mol_type = other RNA
tcttattaactacggtgagg

SEQ ID NO: 22233 - RNA, 20 nt, synthetic construct
  source 1..20: mol_type = other RNA
tattaactacggtgaggcgg

SEQ ID NO: 22234 - RNA, 20 nt, synthetic construct
  source 1..20: mol_type = other RNA
attaactacggtgaggcggt

SEQ ID NO: 22235 - RNA, 20 nt, synthetic construct
  source 1..20: mol_type = other RNA
cggtgaggcggtgggaatcc

SEQ ID NO: 22236 - RNA, 20 nt, synthetic construct
  source 1..20: mol_type = other RNA
tgaggcggtgggaatcctgg

SEQ ID NO: 22237 - RNA, 20 nt, synthetic construct
  source 1..20: mol_type = other RNA
acccttgacgcaatatatgc

SEQ ID NO: 22238 - RNA, 20 nt, synthetic construct
  source 1..20: mol_type = other RNA
atatgctggactcccaccac

SEQ ID NO: 22239 - RNA, 20 nt, synthetic construct
  source 1..20: mol_type = other RNA
ggactcccaccaccggtccg

SEQ ID NO: 22240 - RNA, 20 nt, synthetic construct
  source 1..20: mol_type = other RNA
cccaccaccggtccgtggcc

SEQ ID NO: 22241 - RNA, 20 nt, synthetic construct
  source 1..20: mol_type = other RNA
caccaccggtccgtggccgg

SEQ ID NO: 22242 - RNA, 20 nt, synthetic construct
  source 1..20: mol_type = other RNA
ccaacaagtcgggaattgtg

SEQ ID NO: 22243 - RNA, 20 nt, synthetic construct
  source 1..20: mol_type = other RNA
acgtctaaagaacccggaag

SEQ ID NO: 22244 - RNA, 20 nt, synthetic construct
  source 1..20: mol_type = other RNA
tagagcttataacgttcgaa

SEQ ID NO: 22245 - RNA, 20 nt, synthetic construct
  source 1..20: mol_type = other RNA
tgcaaactggtgtatccgct

SEQ ID NO: 22246 - RNA, 20 nt, synthetic construct
  source 1..20: mol_type = other RNA
cacctacatcatgcattctg

SEQ ID NO: 22247 - RNA, 20 nt, synthetic construct
  source 1..20: mol_type = other RNA
tcattattcgcatatatcta

SEQ ID NO: 22248 - RNA, 20 nt, synthetic construct
  source 1..20: mol_type = other RNA
cattattcgcatatatctac

SEQ ID NO: 22249 - RNA, 20 nt, synthetic construct
  source 1..20: mol_type = other RNA
acgcagtactaatacccgaa

SEQ ID NO: 22250 - RNA, 20 nt, synthetic construct
  source 1..20: mol_type = other RNA
ctattaaatagcacgattag

SEQ ID NO: 22251 - RNA, 20 nt, synthetic construct
  source 1..20: mol_type = other RNA
agcacgattagaggaatacc

SEQ ID NO: 22252 - RNA, 20 nt, synthetic construct
  source 1..20: mol_type = other RNA
taagcttatgcgccaccgtg

SEQ ID NO: 22253 - RNA, 20 nt, synthetic construct
  source 1..20: mol_type = other RNA
cgccaccgtgtggatgccca

SEQ ID NO: 22254 - RNA, 20 nt, synthetic construct
  source 1..20: mol_type = other RNA
accatcgtgtcgtcctctat

SEQ ID NO: 22255 - RNA, 20 nt, synthetic construct
  source 1..20: mol_type = other RNA
agtgaaattagaacggttat

SEQ ID NO: 22256 - RNA, 20 nt, synthetic construct
  source 1..20: mol_type = other RNA
gtgaaattagaacggttatg

SEQ ID NO: 22257 - RNA, 20 nt, synthetic construct
  source 1..20: mol_type = other RNA
tgaaattagaacggttatgg

SEQ ID NO: 22258 - RNA, 20 nt, synthetic construct
  source 1..20: mol_type = other RNA
gcagatctcatgacaagaac

SEQ ID NO: 22259 - RNA, 20 nt, synthetic construct
  source 1..20: mol_type = other RNA
tctcatgacaagaacgggac

SEQ ID NO: 22260 - RNA, 20 nt, synthetic construct
  source 1..20: mol_type = other RNA
ttccaacgtgttgttgcgaa

SEQ ID NO: 22261 - RNA, 20 nt, synthetic construct
  source 1..20: mol_type = other RNA
tattgccgcgcctaccctta

SEQ ID NO: 22262 - RNA, 20 nt, synthetic construct
  source 1..20: mol_type = other RNA
attgccgcgcctacccttat

SEQ ID NO: 22263 - RNA, 20 nt, synthetic construct
  source 1..20: mol_type = other RNA
atgggctctgttcctcgcat

SEQ ID NO: 22264 - RNA, 20 nt, synthetic construct
  source 1..20: mol_type = other RNA
tgggctctgttcctcgcata

SEQ ID NO: 22265 - RNA, 20 nt, synthetic construct
  source 1..20: mol_type = other RNA
catgtactctgacatcatta

SEQ ID NO: 22266 - RNA, 20 nt, synthetic construct
  source 1..20: mol_type = other RNA
cctgcccaacattcgcataa

SEQ ID NO: 22267 - RNA, 20 nt, synthetic construct
  source 1..20: mol_type = other RNA
ctgcccaacattcgcataaa

SEQ ID NO: 22268 - RNA, 20 nt, synthetic construct
  source 1..20: mol_type = other RNA
cttatgaatattatccggat

SEQ ID NO: 22269 - RNA, 20 nt, synthetic construct
  source 1..20: mol_type = other RNA
cggtgttagtatacttgtag

SEQ ID NO: 22270 - RNA, 20 nt, synthetic construct
  source 1..20: mol_type = other RNA
ggtgttagtatacttgtagc

SEQ ID NO: 22271 - RNA, 20 nt, synthetic construct
  source 1..20: mol_type = other RNA
ttaatacgaatgcgtgcgat

SEQ ID NO: 22272 - RNA, 20 nt, synthetic construct
  source 1..20: mol_type = other RNA
cgaatgcgtgcgataggatt

SEQ ID NO: 22273 - RNA, 20 nt, synthetic construct
  source 1..20: mol_type = other RNA
cgtgcgataggattcggcaa

SEQ ID NO: 22274 - RNA, 20 nt, synthetic construct
  source 1..20: mol_type = other RNA
gtgagaccatcatcttccaa

SEQ ID NO: 22275 - RNA, 20 nt, synthetic construct
  source 1..20: mol_type = other RNA
agaccatcatcttccaacgg

SEQ ID NO: 22276 - RNA, 20 nt, synthetic construct
  source 1..20: mol_type = other RNA
tataacctcttcatcggtac

SEQ ID NO: 22277 - RNA, 20 nt, synthetic construct
  source 1..20: mol_type = other RNA
ataacctcttcatcggtact

SEQ ID NO: 22278 - RNA, 20 nt, synthetic construct
  source 1..20: mol_type = other RNA
ttcatcggtactgggaggaa

SEQ ID NO: 22279 - RNA, 20 nt, synthetic construct
  source 1..20: mol_type = other RNA
ttgcttgttgcaatgcttgt

SEQ ID NO: 22280 - RNA, 20 nt, synthetic construct
  source 1..20: mol_type = other RNA
gtgcgacaacacacccgcat

SEQ ID NO: 22281 - RNA, 20 nt, synthetic construct
  source 1..20: mol_type = other RNA
tgcgacaacacacccgcatt

SEQ ID NO: 22282 - RNA, 20 nt, synthetic construct
  source 1..20: mol_type = other RNA
attgccgcgtaggttccaat

SEQ ID NO: 22283 - RNA, 20 nt, synthetic construct
  source 1..20: mol_type = other RNA
agtgtagccgtgttggaact

SEQ ID NO: 22284 - RNA, 20 nt, synthetic construct
  source 1..20: mol_type = other RNA
aactaggtctgtaaggctac

SEQ ID NO: 22285 - RNA, 20 nt, synthetic construct
  source 1..20: mol_type = other RNA
ggtctgtaaggctactggtt

SEQ ID NO: 22286 - RNA, 20 nt, synthetic construct
  source 1..20: mol_type = other RNA
aaagtcagtactgttgataa

SEQ ID NO: 22287 - RNA, 20 nt, synthetic construct
  source 1..20: mol_type = other RNA
atcattgggcgcaatatctc

SEQ ID NO: 22288 - RNA, 20 nt, synthetic construct
  source 1..20: mol_type = other RNA
attgggcgcaatatctccgg

SEQ ID NO: 22289 - RNA, 20 nt, synthetic construct
  source 1..20: mol_type = other RNA
tgcttatcgccgtacatagc

SEQ ID NO: 22290 - RNA, 20 nt, synthetic construct
  source 1..20: mol_type = other RNA
tgggttgatccatcaacgtg

SEQ ID NO: 22291 - RNA, 20 nt, synthetic construct
  source 1..20: mol_type = other RNA
ccagaaacgcagtgcgttga

SEQ ID NO: 22292 - RNA, 20 nt, synthetic construct
  source 1..20: mol_type = other RNA
aatagggccgtaatgtcgta

SEQ ID NO: 22293 - RNA, 20 nt, synthetic construct
  source 1..20: mol_type = other RNA
gccgtaatgtcgtatggtat

SEQ ID NO: 22294 - RNA, 20 nt, synthetic construct
  source 1..20: mol_type = other RNA
cattataggcctgcacgact

SEQ ID NO: 22295 - RNA, 20 nt, synthetic construct
  source 1..20: mol_type = other RNA
taggcctgcacgactaggtt

SEQ ID NO: 22296 - RNA, 20 nt, synthetic construct
  source 1..20: mol_type = other RNA
aggtgttgtaaccttattga

SEQ ID NO: 22297 - RNA, 20 nt, synthetic construct
  source 1..20: mol_type = other RNA
agtacgcacgtgattggtat

SEQ ID NO: 22298 - RNA, 20 nt, synthetic construct
  source 1..20: mol_type = other RNA
tcgggatccgaataacatat

SEQ ID NO: 22299 - RNA, 20 nt, synthetic construct
  source 1..20: mol_type = other RNA
cacctccttagtagccgaat

SEQ ID NO: 22300 - RNA, 20 nt, synthetic construct
  source 1..20: mol_type = other RNA
cgaatcggctatgtccataa

SEQ ID NO: 22301 - RNA, 20 nt, synthetic construct
  source 1..20: mol_type = other RNA
cggctatgtccataaaggtt

SEQ ID NO: 22302 - RNA, 20 nt, synthetic construct
  source 1..20: mol_type = other RNA
tctgtaccattccatccggt

SEQ ID NO: 22303 - RNA, 20 nt, synthetic construct
  source 1..20: mol_type = other RNA
cggcagtaccttaataaact

SEQ ID NO: 22304 - RNA, 20 nt, synthetic construct
  source 1..20: mol_type = other RNA
agtaccttaataaactcggt

SEQ ID NO: 22305 - RNA, 20 nt, synthetic construct
  source 1..20: mol_type = other RNA
ttgacgcatacagtcatcaa

SEQ ID NO: 22306 - RNA, 20 nt, synthetic construct
  source 1..20: mol_type = other RNA
tcaatggcaatacgcgtgcg

SEQ ID NO: 22307 - RNA, 20 nt, synthetic construct
  source 1..20: mol_type = other RNA
atacgcgtgcgcggagtata

SEQ ID NO: 22308 - RNA, 20 nt, synthetic construct
  source 1..20: mol_type = other RNA
gtatacggcgagatatgctt

SEQ ID NO: 22309 - RNA, 20 nt, synthetic construct
  source 1..20: mol_type = other RNA
ggcgagatatgcttaggaac

SEQ ID NO: 22310 - RNA, 20 nt, synthetic construct
  source 1..20: mol_type = other RNA
gagatatgcttaggaaccgg

SEQ ID NO: 22311 - RNA, 20 nt, synthetic construct
  source 1..20: mol_type = other RNA
agatatgcttaggaaccggc

SEQ ID NO: 22312 - RNA, 20 nt, synthetic construct
  source 1..20: mol_type = other RNA
ccatgatccagaccgctagt

SEQ ID NO: 22313 - RNA, 20 nt, synthetic construct
  source 1..20: mol_type = other RNA
cagaccgctagtcggcgatc

SEQ ID NO: 22314 - RNA, 20 nt, synthetic construct
  source 1..20: mol_type = other RNA
cgctagtcggcgatcaggaa

SEQ ID NO: 22315 - RNA, 20 nt, synthetic construct
  source 1..20: mol_type = other RNA
gctagtcggcgatcaggaaa

SEQ ID NO: 22316 - RNA, 20 nt, synthetic construct
  source 1..20: mol_type = other RNA
aaatctgctcatatatatgc

SEQ ID NO: 22317 - RNA, 20 nt, synthetic construct
  source 1..20: mol_type = other RNA
ctcatatatatgcagggcaa

SEQ ID NO: 22318 - RNA, 20 nt, synthetic construct
  source 1..20: mol_type = other RNA
gcaagggtatactgaacatc

SEQ ID NO: 22319 - RNA, 20 nt, synthetic construct
  source 1..20: mol_type = other RNA
acatattgaacaatatggaa

SEQ ID NO: 22320 - RNA, 20 nt, synthetic construct
  source 1..20: mol_type = other RNA
atcgagtaaagcaaagctgc

SEQ ID NO: 22321 - RNA, 20 nt, synthetic construct
  source 1..20: mol_type = other RNA
caactgcccgatcctcgagc

SEQ ID NO: 22322 - RNA, 20 nt, synthetic construct
  source 1..20: mol_type = other RNA
gattgcagacgccattaacc

SEQ ID NO: 22323 - RNA, 20 nt, synthetic construct
  source 1..20: mol_type = other RNA
aagctcatagataccaccga

SEQ ID NO: 22324 - RNA, 20 nt, synthetic construct
  source 1..20: mol_type = other RNA
agctcatagataccaccgat

SEQ ID NO: 22325 - RNA, 20 nt, synthetic construct
  source 1..20: mol_type = other RNA
gctcatagataccaccgatg

SEQ ID NO: 22326 - RNA, 20 nt, synthetic construct
  source 1..20: mol_type = other RNA
cctaactcatggactgcgcg

SEQ ID NO: 22327 - RNA, 20 nt, synthetic construct
  source 1..20: mol_type = other RNA
gcggaatatcttgatgtaca

SEQ ID NO: 22328 - RNA, 20 nt, synthetic construct
  source 1..20: mol_type = other RNA
taagcaacttcacgagcgca

SEQ ID NO: 22329 - RNA, 20 nt, synthetic construct
  source 1..20: mol_type = other RNA
acttcacgagcgcatggtga

SEQ ID NO: 22330 - RNA, 20 nt, synthetic construct
  source 1..20: mol_type = other RNA
tcacgagcgcatggtgacgg

SEQ ID NO: 22331 - RNA, 20 nt, synthetic construct
  source 1..20: mol_type = other RNA
tgataaactgcagacggatg

SEQ ID NO: 22332 - RNA, 20 nt, synthetic construct
  source 1..20: mol_type = other RNA
gaggattgaagcgcaaagac

SEQ ID NO: 22333 - RNA, 20 nt, synthetic construct
  source 1..20: mol_type = other RNA
ccttgacgccgaacataacg

SEQ ID NO: 22334 - RNA, 20 nt, synthetic construct
  source 1..20: mol_type = other RNA
gcgcttgatctaagtcttat

SEQ ID NO: 22335 - RNA, 20 nt, synthetic construct
  source 1..20: mol_type = other RNA
cagcaaggccgcgcggtcgc

SEQ ID NO: 22336 - RNA, 20 nt, synthetic construct
  source 1..20: mol_type = other RNA
gtcgcaggttgacctcaacc

SEQ ID NO: 22337 - RNA, 20 nt, synthetic construct
  source 1..20: mol_type = other RNA
tgcgggacgcctcatgcagt

SEQ ID NO: 22338 - RNA, 20 nt, synthetic construct
  source 1..20: mol_type = other RNA
acgcctcatgcagttggata

SEQ ID NO: 22339 - RNA, 20 nt, synthetic construct
  source 1..20: mol_type = other RNA
aaatgcgcgcattaattctc

SEQ ID NO: 22340 - RNA, 20 nt, synthetic construct
  source 1..20: mol_type = other RNA
agatcttgccagaggacacg

SEQ ID NO: 22341 - RNA, 20 nt, synthetic construct
  source 1..20: mol_type = other RNA
gatcttgccagaggacacgt

SEQ ID NO: 22342 - RNA, 20 nt, synthetic construct
  source 1..20: mol_type = other RNA
ggacacgtgggcccaaaccc

SEQ ID NO: 22343 - RNA, 20 nt, synthetic construct
  source 1..20: mol_type = other RNA
cacgtgggcccaaaccctgg

SEQ ID NO: 22344 - RNA, 20 nt, synthetic construct
  source 1..20: mol_type = other RNA
agctgtaagcgccatcgagc

SEQ ID NO: 22345 - RNA, 20 nt, synthetic construct
  source 1..20: mol_type = other RNA
acgccgcttctatcgagctc

SEQ ID NO: 22346 - RNA, 20 nt, synthetic construct
  source 1..20: mol_type = other RNA
cgcttctatcgagctctgga

SEQ ID NO: 22347 - RNA, 20 nt, synthetic construct
  source 1..20: mol_type = other RNA
gcttctatcgagctctggaa

SEQ ID NO: 22348 - RNA, 20 nt, synthetic construct
  source 1..20: mol_type = other RNA
tcaaacagtccagcagatgt

SEQ ID NO: 22349 - RNA, 20 nt, synthetic construct
  source 1..20: mol_type = other RNA
ttggatggcgtgcgcattat

SEQ ID NO: 22350 - RNA, 20 nt, synthetic construct
  source 1..20: mol_type = other RNA
gcgtgcgcattataggacga

SEQ ID NO: 22351 - RNA, 20 nt, synthetic construct
  source 1..20: mol_type = other RNA
tataggacgatggttcaccg

SEQ ID NO: 22352 - RNA, 20 nt, synthetic construct
  source 1..20: mol_type = other RNA
cgatggttcaccgaggcaac

SEQ ID NO: 22353 - RNA, 20 nt, synthetic construct
  source 1..20: mol_type = other RNA
gatggttcaccgaggcaaca

SEQ ID NO: 22354 - RNA, 20 nt, synthetic construct
  source 1..20: mol_type = other RNA
atccaacaaggccgaagcgt

SEQ ID NO: 22355 - RNA, 20 nt, synthetic construct
  source 1..20: mol_type = other RNA
gcccggattggagacatgct

SEQ ID NO: 22356 - RNA, 20 nt, synthetic construct
  source 1..20: mol_type = other RNA
cccggattggagacatgctt

SEQ ID NO: 22357 - RNA, 20 nt, synthetic construct
  source 1..20: mol_type = other RNA
cggattggagacatgcttgg

SEQ ID NO: 22358 - RNA, 20 nt, synthetic construct
  source 1..20: mol_type = other RNA
agcgcttgcacgaactcccg

SEQ ID NO: 22359 - RNA, 20 nt, synthetic construct
  source 1..20: mol_type = other RNA
acgacgccctatcaacccgc

SEQ ID NO: 22360 - RNA, 20 nt, synthetic construct
  source 1..20: mol_type = other RNA
cgacgccctatcaacccgct

SEQ ID NO: 22361 - RNA, 20 nt, synthetic construct
  source 1..20: mol_type = other RNA
atcaacccgctgggaaaccg

SEQ ID NO: 22362 - RNA, 20 nt, synthetic construct
  source 1..20: mol_type = other RNA
tatacccacacgtatgatac

SEQ ID NO: 22363 - RNA, 20 nt, synthetic construct
  source 1..20: mol_type = other RNA
cgccgatgagctagaacctg

SEQ ID NO: 22364 - RNA, 20 nt, synthetic construct
  source 1..20: mol_type = other RNA
gatctcgatgcttcctgagc

SEQ ID NO: 22365 - RNA, 20 nt, synthetic construct
  source 1..20: mol_type = other RNA
tcgatgcttcctgagctgga

SEQ ID NO: 22366 - RNA, 20 nt, synthetic construct
  source 1..20: mol_type = other RNA
cctattgagcttattaacat

SEQ ID NO: 22367 - RNA, 20 nt, synthetic construct
  source 1..20: mol_type = other RNA
ttgtaaatgaaataaaccgc

SEQ ID NO: 22368 - RNA, 20 nt, synthetic construct
  source 1..20: mol_type = other RNA
gcgttatcacacgcactgaa

SEQ ID NO: 22369 - RNA, 20 nt, synthetic construct
  source 1..20: mol_type = other RNA
cgttatcacacgcactgaat

SEQ ID NO: 22370 - RNA, 20 nt, synthetic construct
  source 1..20: mol_type = other RNA
gcgcgaactatgaatgactt

SEQ ID NO: 22371 - RNA, 20 nt, synthetic construct
  source 1..20: mol_type = other RNA
cgcaattacttccctccgat

SEQ ID NO: 22372 - RNA, 20 nt, synthetic construct
  source 1..20: mol_type = other RNA
gactctgtggatgtccaaac

SEQ ID NO: 22373 - RNA, 20 nt, synthetic construct
  source 1..20: mol_type = other RNA
cccagcctacaacaagaatt

SEQ ID NO: 22374 - RNA, 20 nt, synthetic construct
  source 1..20: mol_type = other RNA
accgagccaatcttattgac

SEQ ID NO: 22375 - RNA, 20 nt, synthetic construct
  source 1..20: mol_type = other RNA
gccaatcttattgactggct

SEQ ID NO: 22376 - RNA, 20 nt, synthetic construct
  source 1..20: mol_type = other RNA
aaatccaggattggttgtta

SEQ ID NO: 22377 - RNA, 20 nt, synthetic construct
  source 1..20: mol_type = other RNA
tgcctggattgtaccatatg

SEQ ID NO: 22378 - RNA, 20 nt, synthetic construct
  source 1..20: mol_type = other RNA
gcctggattgtaccatatgt

SEQ ID NO: 22379 - RNA, 20 nt, synthetic construct
  source 1..20: mol_type = other RNA
agaattagccgcaagatatt

SEQ ID NO: 22380 - RNA, 20 nt, synthetic construct
  source 1..20: mol_type = other RNA
attaaaccacccaccgatgc

SEQ ID NO: 22381 - RNA, 20 nt, synthetic construct
  source 1..20: mol_type = other RNA
taaaccacccaccgatgccg

SEQ ID NO: 22382 - RNA, 20 nt, synthetic construct
  source 1..20: mol_type = other RNA
tcctggcggtgaattaggcc

SEQ ID NO: 22383 - RNA, 20 nt, synthetic construct
  source 1..20: mol_type = other RNA
tggcggtgaattaggcctgg

SEQ ID NO: 22384 - RNA, 20 nt, synthetic construct
  source 1..20: mol_type = other RNA
ggcggtgaattaggcctgga

SEQ ID NO: 22385 - RNA, 20 nt, synthetic construct
  source 1..20: mol_type = other RNA
tataatgtactgcaacttcg

SEQ ID NO: 22386 - RNA, 20 nt, synthetic construct
  source 1..20: mol_type = other RNA
aatgtactgcaacttcgagg

SEQ ID NO: 22387 - RNA, 20 nt, synthetic construct
  source 1..20: mol_type = other RNA
atgtactgcaacttcgaggt

SEQ ID NO: 22388 - RNA, 20 nt, synthetic construct
  source 1..20: mol_type = other RNA
tgtactgcaacttcgaggtg

SEQ ID NO: 22389 - RNA, 20 nt, synthetic construct
  source 1..20: mol_type = other RNA
tggactccgtgtagagcaag

SEQ ID NO: 22390 - RNA, 20 nt, synthetic construct
  source 1..20: mol_type = other RNA
cgtgtagagcaagtggtact

SEQ ID NO: 22391 - RNA, 20 nt, synthetic construct
  source 1..20: mol_type = other RNA
cttcgacgttatcgcctata

SEQ ID NO: 22392 - RNA, 20 nt, synthetic construct
  source 1..20: mol_type = other RNA
cgcctatatggatcagacta

SEQ ID NO: 22393 - RNA, 20 nt, synthetic construct
  source 1..20: mol_type = other RNA
ttgtagcctcgtacattgcc

SEQ ID NO: 22394 - RNA, 20 nt, synthetic construct
  source 1..20: mol_type = other RNA
ttatcaatgcattcgccaac

SEQ ID NO: 22395 - RNA, 20 nt, synthetic construct
  source 1..20: mol_type = other RNA
gcacgtgataacatcgcctt

SEQ ID NO: 22396 - RNA, 20 nt, synthetic construct
  source 1..20: mol_type = other RNA
catgcttcagcggcttatta

SEQ ID NO: 22397 - RNA, 20 nt, synthetic construct
  source 1..20: mol_type = other RNA
attaaggatactaaccgcca

SEQ ID NO: 22398 - RNA, 20 nt, synthetic construct
  source 1..20: mol_type = other RNA
tggctcgtcctaatctgatg

SEQ ID NO: 22399 - RNA, 20 nt, synthetic construct
  source 1..20: mol_type = other RNA
cctatgacaggactatccgt

SEQ ID NO: 22400 - RNA, 20 nt, synthetic construct
  source 1..20: mol_type = other RNA
gacaggactatccgtcggtc

SEQ ID NO: 22401 - RNA, 20 nt, synthetic construct
  source 1..20: mol_type = other RNA
aggactatccgtcggtcagg

SEQ ID NO: 22402 - RNA, 20 nt, synthetic construct
  source 1..20: mol_type = other RNA
cgatgttgtgcgaaagcgat

SEQ ID NO: 22403 - RNA, 20 nt, synthetic construct
  source 1..20: mol_type = other RNA
cgattggtcgcagtgatcga

SEQ ID NO: 22404 - RNA, 20 nt, synthetic construct
  source 1..20: mol_type = other RNA
gattggtcgcagtgatcgac

SEQ ID NO: 22405 - RNA, 20 nt, synthetic construct
  source 1..20: mol_type = other RNA
gtgatcgacgggatcattag

SEQ ID NO: 22406 - RNA, 20 nt, synthetic construct
  source 1..20: mol_type = other RNA
cattagaggctcccacactc

SEQ ID NO: 22407 - RNA, 20 nt, synthetic construct
  source 1..20: mol_type = other RNA
ctatatgtcccggtacaata

SEQ ID NO: 22408 - RNA, 20 nt, synthetic construct
  source 1..20: mol_type = other RNA
gataaacctattataacagc

SEQ ID NO: 22409 - RNA, 20 nt, synthetic construct
  source 1..20: mol_type = other RNA
cctattataacagcgggaat

SEQ ID NO: 22410 - RNA, 20 nt, synthetic construct
  source 1..20: mol_type = other RNA
ctattataacagcgggaata

SEQ ID NO: 22411 - RNA, 20 nt, synthetic construct
  source 1..20: mol_type = other RNA
cgtggaaagctcttaccaag

SEQ ID NO: 22412 - RNA, 20 nt, synthetic construct
  source 1..20: mol_type = other RNA
aaaggccaaacacgcactct

SEQ ID NO: 22413 - RNA, 20 nt, synthetic construct
  source 1..20: mol_type = other RNA
ggtacgatcgctaaacaccg

SEQ ID NO: 22414 - RNA, 20 nt, synthetic construct
  source 1..20: mol_type = other RNA
tggaaacgaattgatgagca

SEQ ID NO: 22415 - RNA, 20 nt, synthetic construct
  source 1..20: mol_type = other RNA
ggaaacgaattgatgagcaa

SEQ ID NO: 22416 - RNA, 20 nt, synthetic construct
  source 1..20: mol_type = other RNA
tgactatgatgaagcaggcc

SEQ ID NO: 22417 - RNA, 20 nt, synthetic construct
  source 1..20: mol_type = other RNA
gactatgatgaagcaggccc

SEQ ID NO: 22418 - RNA, 20 nt, synthetic construct
  source 1..20: mol_type = other RNA
ttggccgcaggtattcaacg

SEQ ID NO: 22419 - RNA, 20 nt, synthetic construct
  source 1..20: mol_type = other RNA
ttcaacgtggacgtgaacaa

SEQ ID NO: 22420 - RNA, 20 nt, synthetic construct
  source 1..20: mol_type = other RNA
caacgtggacgtgaacaatg

SEQ ID NO: 22421 - RNA, 20 nt, synthetic construct
  source 1..20: mol_type = other RNA
aacgtggacgtgaacaatgg

SEQ ID NO: 22422 - RNA, 20 nt, synthetic construct
  source 1..20: mol_type = other RNA
ggacacagcaataccgagct

SEQ ID NO: 22423 - RNA, 20 nt, synthetic construct
  source 1..20: mol_type = other RNA
ctgatgatgaagcgactcaa

SEQ ID NO: 22424 - RNA, 20 nt, synthetic construct
  source 1..20: mol_type = other RNA
tgcacgagcacccgttcgta

SEQ ID NO: 22425 - RNA, 20 nt, synthetic construct
  source 1..20: mol_type = other RNA
ctggtccatcgttaaacaag

SEQ ID NO: 22426 - RNA, 20 nt, synthetic construct
  source 1..20: mol_type = other RNA
tggtccatcgttaaacaagt

SEQ ID NO: 22427 - RNA, 20 nt, synthetic construct
  source 1..20: mol_type = other RNA
aagcccaccttagtacaaat

SEQ ID NO: 22428 - RNA, 20 nt, synthetic construct
  source 1..20: mol_type = other RNA
gagtacgggttctccatcac

SEQ ID NO: 22429 - RNA, 20 nt, synthetic construct
  source 1..20: mol_type = other RNA
gaagacagatctagaacccg

SEQ ID NO: 22430 - RNA, 20 nt, synthetic construct
  source 1..20: mol_type = other RNA
tggcaaatcataagggtcat

SEQ ID NO: 22431 - RNA, 20 nt, synthetic construct
  source 1..20: mol_type = other RNA
gaaataaagtcgtagcaaga

SEQ ID NO: 22432 - RNA, 20 nt, synthetic construct
  source 1..20: mol_type = other RNA
cgcatcagcgcattgccggc

SEQ ID NO: 22433 - RNA, 20 nt, synthetic construct
  source 1..20: mol_type = other RNA
gcatcagcgcattgccggct

SEQ ID NO: 22434 - RNA, 20 nt, synthetic construct
  source 1..20: mol_type = other RNA
ttgccggctgggttgccagc

SEQ ID NO: 22435 - RNA, 20 nt, synthetic construct
  source 1..20: mol_type = other RNA
gttgccagctggattaccag

SEQ ID NO: 22436 - RNA, 20 nt, synthetic construct
  source 1..20: mol_type = other RNA
attaccagcgggcttaccag

SEQ ID NO: 22437 - RNA, 20 nt, synthetic construct
  source 1..20: mol_type = other RNA
ctcagcaaattgcgatgctg

SEQ ID NO: 22438 - RNA, 20 nt, synthetic construct
  source 1..20: mol_type = other RNA
gcatgcgagacataaagatt

SEQ ID NO: 22439 - RNA, 20 nt, synthetic construct
  source 1..20: mol_type = other RNA
gcttaatgatatctattccg

SEQ ID NO: 22440 - RNA, 20 nt, synthetic construct
  source 1..20: mol_type = other RNA
aggaaagagtacttcctcgt

SEQ ID NO: 22441 - RNA, 20 nt, synthetic construct
  source 1..20: mol_type = other RNA
cttcctcgtaggccatacgt

SEQ ID NO: 22442 - RNA, 20 nt, synthetic construct
  source 1..20: mol_type = other RNA
gtaggccatacgtaggtaac

SEQ ID NO: 22443 - RNA, 20 nt, synthetic construct
  source 1..20: mol_type = other RNA
tggtgccattatcttgccgc

SEQ ID NO: 22444 - RNA, 20 nt, synthetic construct
  source 1..20: mol_type = other RNA
ccgcaggtattcattcacct

SEQ ID NO: 22445 - RNA, 20 nt, synthetic construct
  source 1..20: mol_type = other RNA
cctctgtataaagactatct

SEQ ID NO: 22446 - RNA, 20 nt, synthetic construct
  source 1..20: mol_type = other RNA
acccgaactggtgactcctc

SEQ ID NO: 22447 - RNA, 20 nt, synthetic construct
  source 1..20: mol_type = other RNA
ctggtgactcctccggctag

SEQ ID NO: 22448 - RNA, 20 nt, synthetic construct
  source 1..20: mol_type = other RNA
gcttcgcgtctaccatggca

SEQ ID NO: 22449 - RNA, 20 nt, synthetic construct
  source 1..20: mol_type = other RNA
tagttccttaaacccaggat

SEQ ID NO: 22450 - RNA, 20 nt, synthetic construct
  source 1..20: mol_type = other RNA
gagacgattgttaaagtgaa

SEQ ID NO: 22451 - RNA, 20 nt, synthetic construct
  source 1..20: mol_type = other RNA
gtagtgaagagattcaccct

SEQ ID NO: 22452 - RNA, 20 nt, synthetic construct
  source 1..20: mol_type = other RNA
gttgtaggccatgatgagtg

SEQ ID NO: 22453 - RNA, 20 nt, synthetic construct
  source 1..20: mol_type = other RNA
gtactcatcatggatagcat

SEQ ID NO: 22454 - RNA, 20 nt, synthetic construct
  source 1..20: mol_type = other RNA
gattcctacctctctgcgat

SEQ ID NO: 22455 - RNA, 20 nt, synthetic construct
  source 1..20: mol_type = other RNA
attcctacctctctgcgatc

SEQ ID NO: 22456 - RNA, 20 nt, synthetic construct
  source 1..20: mol_type = other RNA
aatgcagtagtaggccacgt

SEQ ID NO: 22457 - RNA, 20 nt, synthetic construct
  source 1..20: mol_type = other RNA
cataatacttccacatgaga

SEQ ID NO: 22458 - RNA, 20 nt, synthetic construct
  source 1..20: mol_type = other RNA
acacatgttgcggacatcaa

SEQ ID NO: 22459 - RNA, 20 nt, synthetic construct
  source 1..20: mol_type = other RNA
tgttgcggacatcaatgggt

SEQ ID NO: 22460 - RNA, 20 nt, synthetic construct
  source 1..20: mol_type = other RNA
acatcaatgggtaggcatcc

SEQ ID NO: 22461 - RNA, 20 nt, synthetic construct
  source 1..20: mol_type = other RNA
atcaatgggtaggcatccag

SEQ ID NO: 22462 - RNA, 20 nt, synthetic construct
  source 1..20: mol_type = other RNA
tagaatggtggtccactctg

SEQ ID NO: 22463 - RNA, 20 nt, synthetic construct
  source 1..20: mol_type = other RNA
gtgatgcacgtgctcgctag

SEQ ID NO: 22464 - RNA, 20 nt, synthetic construct
  source 1..20: mol_type = other RNA
tccggaacggttcccttaac

SEQ ID NO: 22465 - RNA, 20 nt, synthetic construct
  source 1..20: mol_type = other RNA
ccggaacggttcccttaaca

SEQ ID NO: 22466 - RNA, 20 nt, synthetic construct
  source 1..20: mol_type = other RNA
ggttcccttaacagggctat

SEQ ID NO: 22467 - RNA, 20 nt, synthetic construct
  source 1..20: mol_type = other RNA
gctataggtctctatatcgt

SEQ ID NO: 22468 - RNA, 20 nt, synthetic construct
  source 1..20: mol_type = other RNA
cgtaggccataacgatgctg

SEQ ID NO: 22469 - RNA, 20 nt, synthetic construct
  source 1..20: mol_type = other RNA
cataacgatgctgtggtctg

SEQ ID NO: 22470 - RNA, 20 nt, synthetic construct
  source 1..20: mol_type = other RNA
ataacgatgctgtggtctgt

SEQ ID NO: 22471 - RNA, 20 nt, synthetic construct
  source 1..20: mol_type = other RNA
taacgatgctgtggtctgtg

SEQ ID NO: 22472 - RNA, 20 nt, synthetic construct
  source 1..20: mol_type = other RNA
aacctgtgtaccaagccgcg

SEQ ID NO: 22473 - RNA, 20 nt, synthetic construct
  source 1..20: mol_type = other RNA
taccaagccgcgaggctcgt

SEQ ID NO: 22474 - RNA, 20 nt, synthetic construct
  source 1..20: mol_type = other RNA
agctgtatccaacttgtaag

SEQ ID NO: 22475 - RNA, 20 nt, synthetic construct
  source 1..20: mol_type = other RNA
ttagctctcgggaaaccatt

SEQ ID NO: 22476 - RNA, 20 nt, synthetic construct
  source 1..20: mol_type = other RNA
ggaaaccattcggtagtaac

SEQ ID NO: 22477 - RNA, 20 nt, synthetic construct
  source 1..20: mol_type = other RNA
gtaacaggttgtgtcgtccg

SEQ ID NO: 22478 - RNA, 20 nt, synthetic construct
  source 1..20: mol_type = other RNA
acaggttgtgtcgtccgcgg

SEQ ID NO: 22479 - RNA, 20 nt, synthetic construct
  source 1..20: mol_type = other RNA
aggctccatatcgtacttca

SEQ ID NO: 22480 - RNA, 20 nt, synthetic construct
  source 1..20: mol_type = other RNA
tcgtacttcatggatatcaa

SEQ ID NO: 22481 - RNA, 20 nt, synthetic construct
  source 1..20: mol_type = other RNA
cgtacttcatggatatcaat

SEQ ID NO: 22482 - RNA, 20 nt, synthetic construct
  source 1..20: mol_type = other RNA
catgaatagtagaggagcat

SEQ ID NO: 22483 - RNA, 20 nt, synthetic construct
  source 1..20: mol_type = other RNA
gtaactcgttgggtaatcac

SEQ ID NO: 22484 - RNA, 20 nt, synthetic construct
  source 1..20: mol_type = other RNA
taactcgttgggtaatcacc

SEQ ID NO: 22485 - RNA, 20 nt, synthetic construct
  source 1..20: mol_type = other RNA
cccgtgcaacaatctcagaa

SEQ ID NO: 22486 - RNA, 20 nt, synthetic construct
  source 1..20: mol_type = other RNA
cgtgcctgcaaatgtgttac

SEQ ID NO: 22487 - RNA, 20 nt, synthetic construct
  source 1..20: mol_type = other RNA
acgtatcgcctattgttaag

SEQ ID NO: 22488 - RNA, 20 nt, synthetic construct
  source 1..20: mol_type = other RNA
cgcctattgttaagcggtag

SEQ ID NO: 22489 - RNA, 20 nt, synthetic construct
  source 1..20: mol_type = other RNA
gcctattgttaagcggtagc

SEQ ID NO: 22490 - RNA, 20 nt, synthetic construct
  source 1..20: mol_type = other RNA
cctattgttaagcggtagcg

SEQ ID NO: 22491 - RNA, 20 nt, synthetic construct
  source 1..20: mol_type = other RNA
gctgaacatcgacgcatcta

SEQ ID NO: 22492 - RNA, 20 nt, synthetic construct
  source 1..20: mol_type = other RNA
ggcagacctcaacacgctag

SEQ ID NO: 22493 - RNA, 20 nt, synthetic construct
  source 1..20: mol_type = other RNA
cggcacgttagccgtcacct

SEQ ID NO: 22494 - RNA, 20 nt, synthetic construct
  source 1..20: mol_type = other RNA
caaacaccacataacttcca

SEQ ID NO: 22495 - RNA, 20 nt, synthetic construct
  source 1..20: mol_type = other RNA
attcatacgattaatgatat

SEQ ID NO: 22496 - RNA, 20 nt, synthetic construct
  source 1..20: mol_type = other RNA
ttcatacgattaatgatatg

SEQ ID NO: 22497 - RNA, 20 nt, synthetic construct
  source 1..20: mol_type = other RNA
tggcgggaatacgagcaagc

SEQ ID NO: 22498 - RNA, 20 nt, synthetic construct
  source 1..20: mol_type = other RNA
ttgacgcaaatgttgcggcc

SEQ ID NO: 22499 - RNA, 20 nt, synthetic construct
  source 1..20: mol_type = other RNA
acgcaaatgttgcggcccgg

SEQ ID NO: 22500 - RNA, 20 nt, synthetic construct
  source 1..20: mol_type = other RNA
cgcaaatgttgcggcccggt

SEQ ID NO: 22501 - RNA, 20 nt, synthetic construct
  source 1..20: mol_type = other RNA
gcccggtgggaaacaatcta

SEQ ID NO: 22502 - RNA, 20 nt, synthetic construct
  source 1..20: mol_type = other RNA
cggtgggaaacaatctacgg

SEQ ID NO: 22503 - RNA, 20 nt, synthetic construct
  source 1..20: mol_type = other RNA
gcaacattcgcatctaccat

SEQ ID NO: 22504 - RNA, 20 nt, synthetic construct
  source 1..20: mol_type = other RNA
caacattcgcatctaccata

SEQ ID NO: 22505 - RNA, 20 nt, synthetic construct
  source 1..20: mol_type = other RNA
cctgcgcaagtacgacacgc

SEQ ID NO: 22506 - RNA, 20 nt, synthetic construct
  source 1..20: mol_type = other RNA
caagtacgacacgcaggcaa

SEQ ID NO: 22507 - RNA, 20 nt, synthetic construct
  source 1..20: mol_type = other RNA
catgccgccagccaagcgca

SEQ ID NO: 22508 - RNA, 20 nt, synthetic construct
  source 1..20: mol_type = other RNA
tcgcgtcataccttgtccta

SEQ ID NO: 22509 - RNA, 20 nt, synthetic construct
  source 1..20: mol_type = other RNA
tgcttcagtgggacaccaca

SEQ ID NO: 22510 - RNA, 20 nt, synthetic construct
  source 1..20: mol_type = other RNA
tcagtgggacaccacatggc

SEQ ID NO: 22511 - RNA, 20 nt, synthetic construct
  source 1..20: mol_type = other RNA
taccgaagatgaccctgtga

SEQ ID NO: 22512 - RNA, 20 nt, synthetic construct
  source 1..20: mol_type = other RNA
tatgtgtaaggataactggt

SEQ ID NO: 22513 - RNA, 20 nt, synthetic construct
  source 1..20: mol_type = other RNA
aacattcccggctacacggt

SEQ ID NO: 22514 - RNA, 20 nt, synthetic construct
  source 1..20: mol_type = other RNA
gtacgaaatcgtaccctcag

SEQ ID NO: 22515 - RNA, 20 nt, synthetic construct
  source 1..20: mol_type = other RNA
aacattgactattgatccta

SEQ ID NO: 22516 - RNA, 20 nt, synthetic construct
  source 1..20: mol_type = other RNA
gatattgaaaccatcgaccg

SEQ ID NO: 22517 - RNA, 20 nt, synthetic construct
  source 1..20: mol_type = other RNA
ttatattcacattctcgcgg

SEQ ID NO: 22518 - RNA, 20 nt, synthetic construct
  source 1..20: mol_type = other RNA
tcacgtatgggatatggagt

SEQ ID NO: 22519 - RNA, 20 nt, synthetic construct
  source 1..20: mol_type = other RNA
cacgtatgggatatggagta

SEQ ID NO: 22520 - RNA, 20 nt, synthetic construct
  source 1..20: mol_type = other RNA
ttaaagattcgtagcccggt

SEQ ID NO: 22521 - RNA, 20 nt, synthetic construct
  source 1..20: mol_type = other RNA
attcgtagcccggtaggcac

SEQ ID NO: 22522 - RNA, 20 nt, synthetic construct
  source 1..20: mol_type = other RNA
ttgcagttcaatgccttcac

SEQ ID NO: 22523 - RNA, 20 nt, synthetic construct
  source 1..20: mol_type = other RNA
gttcaatgccttcaccggct

SEQ ID NO: 22524 - RNA, 20 nt, synthetic construct
  source 1..20: mol_type = other RNA
actccatatgcgaacatgca

SEQ ID NO: 22525 - RNA, 20 nt, synthetic construct
  source 1..20: mol_type = other RNA
catatgcgaacatgcaaggc

SEQ ID NO: 22526 - RNA, 20 nt, synthetic construct
  source 1..20: mol_type = other RNA
ttatgttgatgtgcactata

SEQ ID NO: 22527 - RNA, 20 nt, synthetic construct
  source 1..20: mol_type = other RNA
tgcactatacggagcccaaa

SEQ ID NO: 22528 - RNA, 20 nt, synthetic construct
  source 1..20: mol_type = other RNA
agctgctaaatatgttgtac

SEQ ID NO: 22529 - RNA, 20 nt, synthetic construct
  source 1..20: mol_type = other RNA
gccctcctatacgatgagaa

SEQ ID NO: 22530 - RNA, 20 nt, synthetic construct
  source 1..20: mol_type = other RNA
tatacgatgagaaaggagta

SEQ ID NO: 22531 - RNA, 20 nt, synthetic construct
  source 1..20: mol_type = other RNA
acgatgagaaaggagtatgg

SEQ ID NO: 22532 - RNA, 20 nt, synthetic construct
  source 1..20: mol_type = other RNA
ttagaaggagcaaatcttgc

SEQ ID NO: 22533 - RNA, 20 nt, synthetic construct
  source 1..20: mol_type = other RNA
cgatgaagagcttaatggat

SEQ ID NO: 22534 - RNA, 20 nt, synthetic construct
  source 1..20: mol_type = other RNA
ggccgcgataaggtacacgg

SEQ ID NO: 22535 - RNA, 20 nt, synthetic construct
  source 1..20: mol_type = other RNA
tgtagcggcagtatacgcag

SEQ ID NO: 22536 - RNA, 20 nt, synthetic construct
  source 1..20: mol_type = other RNA
cgcagtggcagcatacgcag

SEQ ID NO: 22537 - RNA, 20 nt, synthetic construct
  source 1..20: mol_type = other RNA
cgcagtggcagtatacgcaa

SEQ ID NO: 22538 - RNA, 20 nt, synthetic construct
  source 1..20: mol_type = other RNA
cgcaatggcagtatacgcag

SEQ ID NO: 22539 - RNA, 20 nt, synthetic construct
  source 1..20: mol_type = other RNA
cgcagcggtaagacgcgccg

SEQ ID NO: 22540 - RNA, 20 nt, synthetic construct
  source 1..20: mol_type = other RNA
agtagttcacgtaatgaccg

SEQ ID NO: 22541 - RNA, 20 nt, synthetic construct
  source 1..20: mol_type = other RNA
accgccttattaatcatcta

SEQ ID NO: 22542 - RNA, 20 nt, synthetic construct
  source 1..20: mol_type = other RNA
attaatcatctacggtccaa

SEQ ID NO: 22543 - RNA, 20 nt, synthetic construct
  source 1..20: mol_type = other RNA
ttatgagcgtaagactaagc

SEQ ID NO: 22544 - RNA, 20 nt, synthetic construct
  source 1..20: mol_type = other RNA
atgcttacgcttcgtaatgt

SEQ ID NO: 22545 - RNA, 20 nt, synthetic construct
  source 1..20: mol_type = other RNA
aactataggccagactacac

SEQ ID NO: 22546 - RNA, 20 nt, synthetic construct
  source 1..20: mol_type = other RNA
ttatgaaacatcgcaagtag

SEQ ID NO: 22547 - RNA, 20 nt, synthetic construct
  source 1..20: mol_type = other RNA
tatgaaacatcgcaagtagt

SEQ ID NO: 22548 - RNA, 20 nt, synthetic construct
  source 1..20: mol_type = other RNA
atcgcaagtagtgggaaact

SEQ ID NO: 22549 - RNA, 20 nt, synthetic construct
  source 1..20: mol_type = other RNA
ataaagatggcgattattgc

SEQ ID NO: 22550 - RNA, 20 nt, synthetic construct
  source 1..20: mol_type = other RNA
taaagatggcgattattgct

SEQ ID NO: 22551 - RNA, 20 nt, synthetic construct
  source 1..20: mol_type = other RNA
ttatgcgaccacatcccatg

SEQ ID NO: 22552 - RNA, 20 nt, synthetic construct
  source 1..20: mol_type = other RNA
gaccacatcccatgcggccg

SEQ ID NO: 22553 - RNA, 20 nt, synthetic construct
  source 1..20: mol_type = other RNA
cagtaaacccgcgctcctcg

SEQ ID NO: 22554 - RNA, 20 nt, synthetic construct
  source 1..20: mol_type = other RNA
atagtatatgtcgcgctgac

SEQ ID NO: 22555 - RNA, 20 nt, synthetic construct
  source 1..20: mol_type = other RNA
atgtcgcgctgactggccaa

SEQ ID NO: 22556 - RNA, 20 nt, synthetic construct
  source 1..20: mol_type = other RNA
tgtcgcgctgactggccaaa

SEQ ID NO: 22557 - RNA, 20 nt, synthetic construct
  source 1..20: mol_type = other RNA
ctgactggccaaagggtcgc

SEQ ID NO: 22558 - RNA, 20 nt, synthetic construct
  source 1..20: mol_type = other RNA
actggccaaagggtcgccgg

SEQ ID NO: 22559 - RNA, 20 nt, synthetic construct
  source 1..20: mol_type = other RNA
gaaggccgacaagattatat

SEQ ID NO: 22560 - RNA, 20 nt, synthetic construct
  source 1..20: mol_type = other RNA
cccaagacttgcttaatagc

SEQ ID NO: 22561 - RNA, 20 nt, synthetic construct
  source 1..20: mol_type = other RNA
caataaagtacgcccgcata

SEQ ID NO: 22562 - RNA, 20 nt, synthetic construct
  source 1..20: mol_type = other RNA
aataaagtacgcccgcatac

SEQ ID NO: 22563 - RNA, 20 nt, synthetic construct
  source 1..20: mol_type = other RNA
ttgggaaacaagcttacctt

SEQ ID NO: 22564 - RNA, 20 nt, synthetic construct
  source 1..20: mol_type = other RNA
ctggcaggatgctccgattc

SEQ ID NO: 22565 - RNA, 20 nt, synthetic construct
  source 1..20: mol_type = other RNA
tggcaggatgctccgattca

SEQ ID NO: 22566 - RNA, 20 nt, synthetic construct
  source 1..20: mol_type = other RNA
attcagggcacggcccagat

SEQ ID NO: 22567 - RNA, 20 nt, synthetic construct
  source 1..20: mol_type = other RNA
ttcctcgcaacggatatgac

SEQ ID NO: 22568 - RNA, 20 nt, synthetic construct
  source 1..20: mol_type = other RNA
tcctcgcaacggatatgact

SEQ ID NO: 22569 - RNA, 20 nt, synthetic construct
  source 1..20: mol_type = other RNA
tacacgcttgtagatccctt

SEQ ID NO: 22570 - RNA, 20 nt, synthetic construct
  source 1..20: mol_type = other RNA
aaagaatgcgtaccgaaact

SEQ ID NO: 22571 - RNA, 20 nt, synthetic construct
  source 1..20: mol_type = other RNA
aacgtaagattcgatgtaaa

SEQ ID NO: 22572 - RNA, 20 nt, synthetic construct
  source 1..20: mol_type = other RNA
ttccctggacgaatatagtt

SEQ ID NO: 22573 - RNA, 20 nt, synthetic construct
  source 1..20: mol_type = other RNA
atataagcacttggtcggcc

SEQ ID NO: 22574 - RNA, 20 nt, synthetic construct
  source 1..20: mol_type = other RNA
taagcacttggtcggccagg

SEQ ID NO: 22575 - RNA, 20 nt, synthetic construct
  source 1..20: mol_type = other RNA
cttggtcggccaggaggtat

SEQ ID NO: 22576 - RNA, 20 nt, synthetic construct
  source 1..20: mol_type = other RNA
ggtcggccaggaggtatcgg

SEQ ID NO: 22577 - RNA, 20 nt, synthetic construct
  source 1..20: mol_type = other RNA
cggccaggaggtatcggtgg

SEQ ID NO: 22578 - RNA, 20 nt, synthetic construct
  source 1..20: mol_type = other RNA
acaagatattactcctatta

SEQ ID NO: 22579 - RNA, 20 nt, synthetic construct
  source 1..20: mol_type = other RNA
tattacggacgcaacgtatc

SEQ ID NO: 22580 - RNA, 20 nt, synthetic construct
  source 1..20: mol_type = other RNA
cataaagcttgcatcgcaaa

SEQ ID NO: 22581 - RNA, 20 nt, synthetic construct
  source 1..20: mol_type = other RNA
atcctcatcaacaccgagat

SEQ ID NO: 22582 - RNA, 20 nt, synthetic construct
  source 1..20: mol_type = other RNA
agacgcatgttcatctatat

SEQ ID NO: 22583 - RNA, 20 nt, synthetic construct
  source 1..20: mol_type = other RNA
tacatacccttccactacgg

SEQ ID NO: 22584 - RNA, 20 nt, synthetic construct
  source 1..20: mol_type = other RNA
tagttgggacacggattacg

SEQ ID NO: 22585 - RNA, 20 nt, synthetic construct
  source 1..20: mol_type = other RNA
agttgggacacggattacgt

SEQ ID NO: 22586 - RNA, 20 nt, synthetic construct
  source 1..20: mol_type = other RNA
gttgggacacggattacgtg

SEQ ID NO: 22587 - RNA, 20 nt, synthetic construct
  source 1..20: mol_type = other RNA
tatcactacggctgatcttg

SEQ ID NO: 22588 - RNA, 20 nt, synthetic construct
  source 1..20: mol_type = other RNA
tacggctgatcttgtggtat

SEQ ID NO: 22589 - RNA, 20 nt, synthetic construct
  source 1..20: mol_type = other RNA
acacaatgggttcgatctgt

SEQ ID NO: 22590 - RNA, 20 nt, synthetic construct
  source 1..20: mol_type = other RNA
cgtcgattcgtggtatcatt

SEQ ID NO: 22591 - RNA, 20 nt, synthetic construct
  source 1..20: mol_type = other RNA
ttgcaacaccttggttccgc

SEQ ID NO: 22592 - RNA, 20 nt, synthetic construct
  source 1..20: mol_type = other RNA
tgcaacaccttggttccgca

SEQ ID NO: 22593 - RNA, 20 nt, synthetic construct
  source 1..20: mol_type = other RNA
tcttgaatacaaccgcagtt

SEQ ID NO: 22594 - RNA, 20 nt, synthetic construct
  source 1..20: mol_type = other RNA
acattgcagcccaaactgcg

SEQ ID NO: 22595 - RNA, 20 nt, synthetic construct
  source 1..20: mol_type = other RNA
cgtggtgttaaacaccatgt

SEQ ID NO: 22596 - RNA, 20 nt, synthetic construct
  source 1..20: mol_type = other RNA
tacctgcagcatgggattat

SEQ ID NO: 22597 - RNA, 20 nt, synthetic construct
  source 1..20: mol_type = other RNA
ctatgcgccctaataagata

SEQ ID NO: 22598 - RNA, 20 nt, synthetic construct
  source 1..20: mol_type = other RNA
ggtcttgtattgatcatacg

SEQ ID NO: 22599 - RNA, 20 nt, synthetic construct
  source 1..20: mol_type = other RNA
ttcgcagcatattccacctc

SEQ ID NO: 22600 - RNA, 20 nt, synthetic construct
  source 1..20: mol_type = other RNA
aggataattacgaagagttg

SEQ ID NO: 22601 - RNA, 20 nt, synthetic construct
  source 1..20: mol_type = other RNA
ggataattacgaagagttgc

SEQ ID NO: 22602 - RNA, 20 nt, synthetic construct
  source 1..20: mol_type = other RNA
cgaagagttgcgggccgcta

SEQ ID NO: 22603 - RNA, 20 nt, synthetic construct
  source 1..20: mol_type = other RNA
catccattcaattaggcaac

SEQ ID NO: 22604 - RNA, 20 nt, synthetic construct
  source 1..20: mol_type = other RNA
ttaggcaactggacactcct

SEQ ID NO: 22605 - RNA, 20 nt, synthetic construct
  source 1..20: mol_type = other RNA
agaaaccggcccggatgctc

SEQ ID NO: 22606 - RNA, 20 nt, synthetic construct
  source 1..20: mol_type = other RNA
gaaaccggcccggatgctcc

SEQ ID NO: 22607 - RNA, 20 nt, synthetic construct
  source 1..20: mol_type = other RNA
aaaccggcccggatgctccg

SEQ ID NO: 22608 - RNA, 20 nt, synthetic construct
  source 1..20: mol_type = other RNA
tcacacggatagcgggatta

SEQ ID NO: 22609 - RNA, 20 nt, synthetic construct
  source 1..20: mol_type = other RNA
cacacggatagcgggattaa

SEQ ID NO: 22610 - RNA, 20 nt, synthetic construct
  source 1..20: mol_type = other RNA
atgtgcctgatgatacgata

SEQ ID NO: 22611 - RNA, 20 nt, synthetic construct
  source 1..20: mol_type = other RNA
tgtgcctgatgatacgatac

SEQ ID NO: 22612 - RNA, 20 nt, synthetic construct
  source 1..20: mol_type = other RNA
atacgatacgggtagatatg

SEQ ID NO: 22613 - RNA, 20 nt, synthetic construct
  source 1..20: mol_type = other RNA
tacgatacgggtagatatgt

SEQ ID NO: 22614 - RNA, 20 nt, synthetic construct
  source 1..20: mol_type = other RNA
atggccctaacgacccattc

SEQ ID NO: 22615 - RNA, 20 nt, synthetic construct
  source 1..20: mol_type = other RNA
tggccctaacgacccattca

SEQ ID NO: 22616 - RNA, 20 nt, synthetic construct
  source 1..20: mol_type = other RNA
accctcaaatcgttcatatg

SEQ ID NO: 22617 - RNA, 20 nt, synthetic construct
  source 1..20: mol_type = other RNA
ccctcaaatcgttcatatga

SEQ ID NO: 22618 - RNA, 20 nt, synthetic construct
  source 1..20: mol_type = other RNA
tccgatcgatatacagcaaa

SEQ ID NO: 22619 - RNA, 20 nt, synthetic construct
  source 1..20: mol_type = other RNA
gtgcttaaaggctgaacaaa

SEQ ID NO: 22620 - RNA, 20 nt, synthetic construct
  source 1..20: mol_type = other RNA
gaaacttgtgtacatccgcg

SEQ ID NO: 22621 - RNA, 20 nt, synthetic construct
  source 1..20: mol_type = other RNA
gtgcgactacattagcaatt

SEQ ID NO: 22622 - RNA, 20 nt, synthetic construct
  source 1..20: mol_type = other RNA
attatcccgtgccacattcg

SEQ ID NO: 22623 - RNA, 20 nt, synthetic construct
  source 1..20: mol_type = other RNA
gcagaagacattcaaccagt

SEQ ID NO: 22624 - RNA, 20 nt, synthetic construct
  source 1..20: mol_type = other RNA
ggccttaatcattacagcgg

SEQ ID NO: 22625 - RNA, 20 nt, synthetic construct
  source 1..20: mol_type = other RNA
atccacgacaaatataaggg

SEQ ID NO: 22626 - RNA, 20 nt, synthetic construct
  source 1..20: mol_type = other RNA
gatacctgccggtccaaagc

SEQ ID NO: 22627 - RNA, 20 nt, synthetic construct
  source 1..20: mol_type = other RNA
aaagccggccggtccaaagc

SEQ ID NO: 22628 - RNA, 20 nt, synthetic construct
  source 1..20: mol_type = other RNA
cgattcaaagccggccagtt

SEQ ID NO: 22629 - RNA, 20 nt, synthetic construct
  source 1..20: mol_type = other RNA
caaagctgttagccgattat

SEQ ID NO: 22630 - RNA, 20 nt, synthetic construct
  source 1..20: mol_type = other RNA
atactaaattcccggtactg

SEQ ID NO: 22631 - RNA, 20 nt, synthetic construct
  source 1..20: mol_type = other RNA
ttacggcgatgcgcaagatc

SEQ ID NO: 22632 - RNA, 20 nt, synthetic construct
  source 1..20: mol_type = other RNA
taggcgcaatgttgttcgta

SEQ ID NO: 22633 - RNA, 20 nt, synthetic construct
  source 1..20: mol_type = other RNA
ccgcaggtggctagcttaaa

SEQ ID NO: 22634 - RNA, 20 nt, synthetic construct
  source 1..20: mol_type = other RNA
atagttcggttccgtctacg

SEQ ID NO: 22635 - RNA, 20 nt, synthetic construct
  source 1..20: mol_type = other RNA
atgccgggccagcactataa

SEQ ID NO: 22636 - RNA, 20 nt, synthetic construct
  source 1..20: mol_type = other RNA
agcgcacaatctacctgcgt

SEQ ID NO: 22637 - RNA, 20 nt, synthetic construct
  source 1..20: mol_type = other RNA
tgtcaaaccgaacatagagc

SEQ ID NO: 22638 - RNA, 20 nt, synthetic construct
  source 1..20: mol_type = other RNA
ccgcccaaagattcgcaaca

SEQ ID NO: 22639 - RNA, 20 nt, synthetic construct
  source 1..20: mol_type = other RNA
agcgtatcaaacccattata

SEQ ID NO: 22640 - RNA, 20 nt, synthetic construct
  source 1..20: mol_type = other RNA
atattgttaccttggtgccc

SEQ ID NO: 22641 - RNA, 20 nt, synthetic construct
  source 1..20: mol_type = other RNA
ctcagtaccgttaaccagtg

SEQ ID NO: 22642 - RNA, 20 nt, synthetic construct
  source 1..20: mol_type = other RNA
accgttaaccagtgcggaaa

SEQ ID NO: 22643 - RNA, 20 nt, synthetic construct
  source 1..20: mol_type = other RNA
tatccgtcccattatcctga

SEQ ID NO: 22644 - RNA, 20 nt, synthetic construct
  source 1..20: mol_type = other RNA
tgtcagttgcaacattcctt

SEQ ID NO: 22645 - RNA, 20 nt, synthetic construct
  source 1..20: mol_type = other RNA
gcgaaataaagatacagtgt

SEQ ID NO: 22646 - RNA, 20 nt, synthetic construct
  source 1..20: mol_type = other RNA
gatacagtgtgggcccgctt

SEQ ID NO: 22647 - RNA, 20 nt, synthetic construct
  source 1..20: mol_type = other RNA
caaggcgcagatgagcgctc

SEQ ID NO: 22648 - RNA, 20 nt, synthetic construct
  source 1..20: mol_type = other RNA
gctctggcgctaaccatgca

SEQ ID NO: 22649 - RNA, 20 nt, synthetic construct
  source 1..20: mol_type = other RNA
ggattaaggaacactgtcca

SEQ ID NO: 22650 - RNA, 20 nt, synthetic construct
  source 1..20: mol_type = other RNA
aagccactctctaaacagcg

SEQ ID NO: 22651 - RNA, 20 nt, synthetic construct
  source 1..20: mol_type = other RNA
agccactctctaaacagcgc

SEQ ID NO: 22652 - RNA, 20 nt, synthetic construct
  source 1..20: mol_type = other RNA
acaggaacgattgaagacat

SEQ ID NO: 22653 - RNA, 20 nt, synthetic construct
  source 1..20: mol_type = other RNA
cttgacattaaacaactcgg

SEQ ID NO: 22654 - RNA, 20 nt, synthetic construct
  source 1..20: mol_type = other RNA
tccataacaacgtaaataac

SEQ ID NO: 22655 - RNA, 20 nt, synthetic construct
  source 1..20: mol_type = other RNA
aaacaacgtctcccggagtt

SEQ ID NO: 22656 - RNA, 20 nt, synthetic construct
  source 1..20: mol_type = other RNA
tccaacctccctcgcagacc

SEQ ID NO: 22657 - RNA, 20 nt, synthetic construct
  source 1..20: mol_type = other RNA
ctcattataaagtcacgcac

SEQ ID NO: 22658 - RNA, 20 nt, synthetic construct
  source 1..20: mol_type = other RNA
ataaagtcacgcactggatc

SEQ ID NO: 22659 - RNA, 20 nt, synthetic construct
  source 1..20: mol_type = other RNA
atgatattaggccaaacagt

SEQ ID NO: 22660 - RNA, 20 nt, synthetic construct
  source 1..20: mol_type = other RNA
ctaccatacgaagcctctga

SEQ ID NO: 22661 - RNA, 20 nt, synthetic construct
  source 1..20: mol_type = other RNA
gggccttatctatgcaaccg

SEQ ID NO: 22662 - RNA, 20 nt, synthetic construct
  source 1..20: mol_type = other RNA
ggccttatctatgcaaccgc

SEQ ID NO: 22663 - RNA, 20 nt, synthetic construct
  source 1..20: mol_type = other RNA
gccttatctatgcaaccgcg

SEQ ID NO: 22664 - RNA, 20 nt, synthetic construct
  source 1..20: mol_type = other RNA
ccttatctatgcaaccgcgg

SEQ ID NO: 22665 - RNA, 20 nt, synthetic construct
  source 1..20: mol_type = other RNA
ggcgcagctacatacaatga

SEQ ID NO: 22666 - RNA, 20 nt, synthetic construct
  source 1..20: mol_type = other RNA
ggaaggacgacagtacggtg

SEQ ID NO: 22667 - RNA, 20 nt, synthetic construct
  source 1..20: mol_type = other RNA
agtacggtgtggaaacccac

SEQ ID NO: 22668 - RNA, 20 nt, synthetic construct
  source 1..20: mol_type = other RNA
cattaagaccgcctgcgaaa

SEQ ID NO: 22669 - RNA, 20 nt, synthetic construct
  source 1..20: mol_type = other RNA
aaacattcatgatcgtccca

SEQ ID NO: 22670 - RNA, 20 nt, synthetic construct
  source 1..20: mol_type = other RNA
cgatagtgaggcgattgcgc

SEQ ID NO: 22671 - RNA, 20 nt, synthetic construct
  source 1..20: mol_type = other RNA
aagcggaaattaagaatctg

SEQ ID NO: 22672 - RNA, 20 nt, synthetic construct
  source 1..20: mol_type = other RNA
agcggaaattaagaatctgt

SEQ ID NO: 22673 - RNA, 20 nt, synthetic construct
  source 1..20: mol_type = other RNA
aaatcccttaaccgctaaag

SEQ ID NO: 22674 - RNA, 20 nt, synthetic construct
  source 1..20: mol_type = other RNA
tccacggttgttgcggaaac

SEQ ID NO: 22675 - RNA, 20 nt, synthetic construct
  source 1..20: mol_type = other RNA
ctgaagtacgtcatagatcc

SEQ ID NO: 22676 - RNA, 20 nt, synthetic construct
  source 1..20: mol_type = other RNA
tgaagtacgtcatagatccc

SEQ ID NO: 22677 - RNA, 20 nt, synthetic construct
  source 1..20: mol_type = other RNA
agtacgtcatagatcccggg

SEQ ID NO: 22678 - RNA, 20 nt, synthetic construct
  source 1..20: mol_type = other RNA
ttgaaacctactaccctgaa

SEQ ID NO: 22679 - RNA, 20 nt, synthetic construct
  source 1..20: mol_type = other RNA
acctactaccctgaatgggc

SEQ ID NO: 22680 - RNA, 20 nt, synthetic construct
  source 1..20: mol_type = other RNA
tactaccctgaatgggcggg

SEQ ID NO: 22681 - RNA, 20 nt, synthetic construct
  source 1..20: mol_type = other RNA
aagccgtatcgagcaaagaa

SEQ ID NO: 22682 - RNA, 20 nt, synthetic construct
  source 1..20: mol_type = other RNA
agccgtatcgagcaaagaaa

SEQ ID NO: 22683 - RNA, 20 nt, synthetic construct
  source 1..20: mol_type = other RNA
gcagtatcctgaaatcatta

SEQ ID NO: 22684 - RNA, 20 nt, synthetic construct
  source 1..20: mol_type = other RNA
tatcctgaaatcattacgga

SEQ ID NO: 22685 - RNA, 20 nt, synthetic construct
  source 1..20: mol_type = other RNA
gaaatcattacggaaggccc

SEQ ID NO: 22686 - RNA, 20 nt, synthetic construct
  source 1..20: mol_type = other RNA
aaatcattacggaaggccct

SEQ ID NO: 22687 - RNA, 20 nt, synthetic construct
  source 1..20: mol_type = other RNA
aatcattacggaaggccctg

SEQ ID NO: 22688 - RNA, 20 nt, synthetic construct
  source 1..20: mol_type = other RNA
ggtcttcaactcacgcagct

SEQ ID NO: 22689 - RNA, 20 nt, synthetic construct
  source 1..20: mol_type = other RNA
cctagccgtcgtgtctgttg

SEQ ID NO: 22690 - RNA, 20 nt, synthetic construct
  source 1..20: mol_type = other RNA
atctattggacagtaaacaa

SEQ ID NO: 22691 - RNA, 20 nt, synthetic construct
  source 1..20: mol_type = other RNA
cggagctatgcttgctgaag

SEQ ID NO: 22692 - RNA, 20 nt, synthetic construct
  source 1..20: mol_type = other RNA
ttaaacgagctggccattgt

SEQ ID NO: 22693 - RNA, 20 nt, synthetic construct
  source 1..20: mol_type = other RNA
cttcgtgcattgtaacgcct

SEQ ID NO: 22694 - RNA, 20 nt, synthetic construct
  source 1..20: mol_type = other RNA
cctcgatggattcgtaaacg

SEQ ID NO: 22695 - RNA, 20 nt, synthetic construct
  source 1..20: mol_type = other RNA
ggagctcatagggttaccta

SEQ ID NO: 22696 - RNA, 20 nt, synthetic construct
  source 1..20: mol_type = other RNA
gctcatagggttacctatgg

SEQ ID NO: 22697 - RNA, 20 nt, synthetic construct
  source 1..20: mol_type = other RNA
atcgtgtatgaccttcataa

SEQ ID NO: 22698 - RNA, 20 nt, synthetic construct
  source 1..20: mol_type = other RNA
ccatactattcgtagagaca

SEQ ID NO: 22699 - RNA, 20 nt, synthetic construct
  source 1..20: mol_type = other RNA
taactcctgggatagctcaa

SEQ ID NO: 22700 - RNA, 20 nt, synthetic construct
  source 1..20: mol_type = other RNA
gggatagctcaagggcaata

SEQ ID NO: 22701 - RNA, 20 nt, synthetic construct
  source 1..20: mol_type = other RNA
ggcgttgtaccattccgcgt

SEQ ID NO: 22702 - RNA, 20 nt, synthetic construct
  source 1..20: mol_type = other RNA
cgcgtaggccgtcacgacct

SEQ ID NO: 22703 - RNA, 20 nt, synthetic construct
  source 1..20: mol_type = other RNA
aggccgtcacgacctcggat

SEQ ID NO: 22704 - RNA, 20 nt, synthetic construct
  source 1..20: mol_type = other RNA
atgtactcgtgaataaagcg

SEQ ID NO: 22705 - RNA, 20 nt, synthetic construct
  source 1..20: mol_type = other RNA
atagttggacgcggcgacca

SEQ ID NO: 22706 - RNA, 20 nt, synthetic construct
  source 1..20: mol_type = other RNA
gttggacgcggcgaccatgg

SEQ ID NO: 22707 - RNA, 20 nt, synthetic construct
  source 1..20: mol_type = other RNA
tctcgagcggtgacatcgcc

SEQ ID NO: 22708 - RNA, 20 nt, synthetic construct
  source 1..20: mol_type = other RNA
agccgcatgaaggcactgtt

SEQ ID NO: 22709 - RNA, 20 nt, synthetic construct
  source 1..20: mol_type = other RNA
aagaaggctgatgttgagct

SEQ ID NO: 22710 - RNA, 20 nt, synthetic construct
  source 1..20: mol_type = other RNA
aaggctgatgttgagcttgg

SEQ ID NO: 22711 - RNA, 20 nt, synthetic construct
  source 1..20: mol_type = other RNA
atagtgatcgcccaatacca

SEQ ID NO: 22712 - RNA, 20 nt, synthetic construct
  source 1..20: mol_type = other RNA
ctccttcaggccgcgaaata

SEQ ID NO: 22713 - RNA, 20 nt, synthetic construct
  source 1..20: mol_type = other RNA
cgcgaaatatggccgtgctc

SEQ ID NO: 22714 - RNA, 20 nt, synthetic construct
  source 1..20: mol_type = other RNA
cacagcctagcatcaagttc

SEQ ID NO: 22715 - RNA, 20 nt, synthetic construct
  source 1..20: mol_type = other RNA
attaatgagcttggccggga

SEQ ID NO: 22716 - RNA, 20 nt, synthetic construct
  source 1..20: mol_type = other RNA
tatagatgtgcagctcatcc

SEQ ID NO: 22717 - RNA, 20 nt, synthetic construct
  source 1..20: mol_type = other RNA
cttgtgggcccaatacataa

SEQ ID NO: 22718 - RNA, 20 nt, synthetic construct
  source 1..20: mol_type = other RNA
ccgatagttggcggatgtat

SEQ ID NO: 22719 - RNA, 20 nt, synthetic construct
  source 1..20: mol_type = other RNA
gttggcggatgtattggcca

SEQ ID NO: 22720 - RNA, 20 nt, synthetic construct
  source 1..20: mol_type = other RNA
cgaatacgacgttgctccat

SEQ ID NO: 22721 - RNA, 20 nt, synthetic construct
  source 1..20: mol_type = other RNA
gaatacgacgttgctccata

SEQ ID NO: 22722 - RNA, 20 nt, synthetic construct
  source 1..20: mol_type = other RNA
aatacgacgttgctccatag

SEQ ID NO: 22723 - RNA, 20 nt, synthetic construct
  source 1..20: mol_type = other RNA
atacgacgttgctccatagg

SEQ ID NO: 22724 - RNA, 20 nt, synthetic construct
  source 1..20: mol_type = other RNA
gggtactccacataatactc

SEQ ID NO: 22725 - RNA, 20 nt, synthetic construct
  source 1..20: mol_type = other RNA
cataatactctggaggaagc

SEQ ID NO: 22726 - RNA, 20 nt, synthetic construct
  source 1..20: mol_type = other RNA
ttatgtaaataccgagcttc

SEQ ID NO: 22727 - RNA, 20 nt, synthetic construct
  source 1..20: mol_type = other RNA
gggatcatgtagcattaata

SEQ ID NO: 22728 - RNA, 20 nt, synthetic construct
  source 1..20: mol_type = other RNA
gagagtgagtggtcgtcggt

SEQ ID NO: 22729 - RNA, 20 nt, synthetic construct
  source 1..20: mol_type = other RNA
agagtgagtggtcgtcggtc

SEQ ID NO: 22730 - RNA, 20 nt, synthetic construct
  source 1..20: mol_type = other RNA
atgtctgccgcgcaatagac

SEQ ID NO: 22731 - RNA, 20 nt, synthetic construct
  source 1..20: mol_type = other RNA
cgcaatagacaggccttaca

SEQ ID NO: 22732 - RNA, 20 nt, synthetic construct
  source 1..20: mol_type = other RNA
ggcttccttgttcattcgta

SEQ ID NO: 22733 - RNA, 20 nt, synthetic construct
  source 1..20: mol_type = other RNA
gaggagccgtagaggagcga

SEQ ID NO: 22734 - RNA, 20 nt, synthetic construct
  source 1..20: mol_type = other RNA
tacggtggcatcgtgctgta

SEQ ID NO: 22735 - RNA, 20 nt, synthetic construct
  source 1..20: mol_type = other RNA
atggcaaagccgtgatagcg

SEQ ID NO: 22736 - RNA, 20 nt, synthetic construct
  source 1..20: mol_type = other RNA
ggcaaagccgtgatagcgcg

SEQ ID NO: 22737 - RNA, 20 nt, synthetic construct
  source 1..20: mol_type = other RNA
gcaaagccgtgatagcgcgg

SEQ ID NO: 22738 - RNA, 20 nt, synthetic construct
  source 1..20: mol_type = other RNA
caaagccgtgatagcgcggg

SEQ ID NO: 22739 - RNA, 20 nt, synthetic construct
  source 1..20: mol_type = other RNA
gtccaacatgagacccgagt

SEQ ID NO: 22740 - RNA, 20 nt, synthetic construct
  source 1..20: mol_type = other RNA
ctgaaagctctcgagtcaaa

SEQ ID NO: 22741 - RNA, 20 nt, synthetic construct
  source 1..20: mol_type = other RNA
gcgctgagcggtgagctgaa

SEQ ID NO: 22742 - RNA, 20 nt, synthetic construct
  source 1..20: mol_type = other RNA
cggtgagctgaatggtatcg

SEQ ID NO: 22743 - RNA, 20 nt, synthetic construct
  source 1..20: mol_type = other RNA
tctatatcgagtggcacgcc

SEQ ID NO: 22744 - RNA, 20 nt, synthetic construct
  source 1..20: mol_type = other RNA
catacgcaatacgccctctg

SEQ ID NO: 22745 - RNA, 20 nt, synthetic construct
  source 1..20: mol_type = other RNA
tgacctcgtggaggaatatg

SEQ ID NO: 22746 - RNA, 20 nt, synthetic construct
  source 1..20: mol_type = other RNA
ggagaacttcgtcgacagtg

SEQ ID NO: 22747 - RNA, 20 nt, synthetic construct
  source 1..20: mol_type = other RNA
cgaggacaaggacgagatcg

SEQ ID NO: 22748 - RNA, 20 nt, synthetic construct
  source 1..20: mol_type = other RNA
gagtctccgtccatctgcga

SEQ ID NO: 22749 - RNA, 20 nt, synthetic construct
  source 1..20: mol_type = other RNA
gcaggcctcgtcgcaaacat

SEQ ID NO: 22750 - RNA, 20 nt, synthetic construct
  source 1..20: mol_type = other RNA
cgccgttagagcgcaacagt

SEQ ID NO: 22751 - RNA, 20 nt, synthetic construct
  source 1..20: mol_type = other RNA
gcgcaacagttggcaattaa

SEQ ID NO: 22752 - RNA, 20 nt, synthetic construct
  source 1..20: mol_type = other RNA
gctcgtcatgcgctgcatca

SEQ ID NO: 22753 - RNA, 20 nt, synthetic construct
  source 1..20: mol_type = other RNA
tgcatcaaggtaacacccga

SEQ ID NO: 22754 - RNA, 20 nt, synthetic construct
  source 1..20: mol_type = other RNA
ctcataaagagacttaaagt

SEQ ID NO: 22755 - RNA, 20 nt, synthetic construct
  source 1..20: mol_type = other RNA
atacatcgtagcaatcacaa

SEQ ID NO: 22756 - RNA, 20 nt, synthetic construct
  source 1..20: mol_type = other RNA
ctattaataaagctgtctat

SEQ ID NO: 22757 - RNA, 20 nt, synthetic construct
  source 1..20: mol_type = other RNA
tgacccgatgttgttgtacc

SEQ ID NO: 22758 - RNA, 20 nt, synthetic construct
  source 1..20: mol_type = other RNA
agagctatagtcacttgagt

SEQ ID NO: 22759 - RNA, 20 nt, synthetic construct
  source 1..20: mol_type = other RNA
tggccttgtccaaatcgcgc

SEQ ID NO: 22760 - RNA, 20 nt, synthetic construct
  source 1..20: mol_type = other RNA
gtccaaatcgcgctggtgat

SEQ ID NO: 22761 - RNA, 20 nt, synthetic construct
  source 1..20: mol_type = other RNA
gcgctggtgataggagctat

SEQ ID NO: 22762 - RNA, 20 nt, synthetic construct
  source 1..20: mol_type = other RNA
ggcaaatgccgtggagattg

SEQ ID NO: 22763 - RNA, 20 nt, synthetic construct
  source 1..20: mol_type = other RNA
cgtggagattgaggcggctt

SEQ ID NO: 22764 - RNA, 20 nt, synthetic construct
  source 1..20: mol_type = other RNA
gattatgccctgcatcttaa

SEQ ID NO: 22765 - RNA, 20 nt, synthetic construct
  source 1..20: mol_type = other RNA
ttacctgcaaggtcccggag

SEQ ID NO: 22766 - RNA, 20 nt, synthetic construct
  source 1..20: mol_type = other RNA
gcccaaagcctatcccgcgc

SEQ ID NO: 22767 - RNA, 20 nt, synthetic construct
  source 1..20: mol_type = other RNA
ggtgttagcgacgtacaacc

SEQ ID NO: 22768 - RNA, 20 nt, synthetic construct
  source 1..20: mol_type = other RNA
tgagatatgtgagccctaca

SEQ ID NO: 22769 - RNA, 20 nt, synthetic construct
  source 1..20: mol_type = other RNA
gcgcgtactaagttgttcac

SEQ ID NO: 22770 - RNA, 20 nt, synthetic construct
  source 1..20: mol_type = other RNA
tataattattatccgggcaa

SEQ ID NO: 22771 - RNA, 20 nt, synthetic construct
  source 1..20: mol_type = other RNA
cgatgtagttcgcgatgctg

SEQ ID NO: 22772 - RNA, 20 nt, synthetic construct
  source 1..20: mol_type = other RNA
tgataaacttccgcagtgta

SEQ ID NO: 22773 - RNA, 20 nt, synthetic construct
  source 1..20: mol_type = other RNA
gataaacttccgcagtgtaa

SEQ ID NO: 22774 - RNA, 20 nt, synthetic construct
  source 1..20: mol_type = other RNA
gcagtgtaagggcgtcacaa

SEQ ID NO: 22775 - RNA, 20 nt, synthetic construct
  source 1..20: mol_type = other RNA
caataagtatctagaacgac

SEQ ID NO: 22776 - RNA, 20 nt, synthetic construct
  source 1..20: mol_type = other RNA
cgacaggaccttgaactgtt

SEQ ID NO: 22777 - RNA, 20 nt, synthetic construct
  source 1..20: mol_type = other RNA
aagaacgattcctgttgcat

SEQ ID NO: 22778 - RNA, 20 nt, synthetic construct
  source 1..20: mol_type = other RNA
ccgccgatcccaacaagaaa

SEQ ID NO: 22779 - RNA, 20 nt, synthetic construct
  source 1..20: mol_type = other RNA
cgatcccaacaagaaatgga

SEQ ID NO: 22780 - RNA, 20 nt, synthetic construct
  source 1..20: mol_type = other RNA
ggacctcattcccatgtatg

SEQ ID NO: 22781 - RNA, 20 nt, synthetic construct
  source 1..20: mol_type = other RNA
cattcccatgtatgaggctc

SEQ ID NO: 22782 - RNA, 20 nt, synthetic construct
  source 1..20: mol_type = other RNA
tgttgctcatatagccacag

SEQ ID NO: 22783 - RNA, 20 nt, synthetic construct
  source 1..20: mol_type = other RNA
atcttcaaatgtacgaccct

SEQ ID NO: 22784 - RNA, 20 nt, synthetic construct
  source 1..20: mol_type = other RNA
ccaaagaaagcatactacgt

SEQ ID NO: 22785 - RNA, 20 nt, synthetic construct
  source 1..20: mol_type = other RNA
gccgctcaagcttaattgca

SEQ ID NO: 22786 - RNA, 20 nt, synthetic construct
  source 1..20: mol_type = other RNA
tcaagcttaattgcatggtt

SEQ ID NO: 22787 - RNA, 20 nt, synthetic construct
  source 1..20: mol_type = other RNA
ggttgggttgaaatggtagt

SEQ ID NO: 22788 - RNA, 20 nt, synthetic construct
  source 1..20: mol_type = other RNA
ggtagtaggtcatattgttc

SEQ ID NO: 22789 - RNA, 20 nt, synthetic construct
  source 1..20: mol_type = other RNA
acacgtaggcgccatagcat

SEQ ID NO: 22790 - RNA, 20 nt, synthetic construct
  source 1..20: mol_type = other RNA
ctggatcgcgaaataatacc

SEQ ID NO: 22791 - RNA, 20 nt, synthetic construct
  source 1..20: mol_type = other RNA
atcgcgaaataatacccggc

SEQ ID NO: 22792 - RNA, 20 nt, synthetic construct
  source 1..20: mol_type = other RNA
tcgcgaaataatacccggca

SEQ ID NO: 22793 - RNA, 20 nt, synthetic construct
  source 1..20: mol_type = other RNA
taatacccggcagggattga

SEQ ID NO: 22794 - RNA, 20 nt, synthetic construct
  source 1..20: mol_type = other RNA
aatacccggcagggattgaa

SEQ ID NO: 22795 - RNA, 20 nt, synthetic construct
  source 1..20: mol_type = other RNA
ggtgtagccaacgtactctg

SEQ ID NO: 22796 - RNA, 20 nt, synthetic construct
  source 1..20: mol_type = other RNA
gtactctgtggtaatcataa

SEQ ID NO: 22797 - RNA, 20 nt, synthetic construct
  source 1..20: mol_type = other RNA
aataaacacctcccgccata

SEQ ID NO: 22798 - RNA, 20 nt, synthetic construct
  source 1..20: mol_type = other RNA
taggacctctcgaatcgtta

SEQ ID NO: 22799 - RNA, 20 nt, synthetic construct
  source 1..20: mol_type = other RNA
aggacctctcgaatcgttag

SEQ ID NO: 22800 - RNA, 20 nt, synthetic construct
  source 1..20: mol_type = other RNA
agtaccctagtaagtcctta

SEQ ID NO: 22801 - RNA, 20 nt, synthetic construct
  source 1..20: mol_type = other RNA
gtaccctagtaagtccttat

SEQ ID NO: 22802 - RNA, 20 nt, synthetic construct
  source 1..20: mol_type = other RNA
ctagatctcgtgccgcaatg

SEQ ID NO: 22803 - RNA, 20 nt, synthetic construct
  source 1..20: mol_type = other RNA
ctcgtgccgcaatgaggttc

SEQ ID NO: 22804 - RNA, 20 nt, synthetic construct
  source 1..20: mol_type = other RNA
cgcaatgaggttcaggataa

SEQ ID NO: 22805 - RNA, 20 nt, synthetic construct
  source 1..20: mol_type = other RNA
tataagcctctatgaagggt

SEQ ID NO: 22806 - RNA, 20 nt, synthetic construct
  source 1..20: mol_type = other RNA
gccatcgtgtgattgatagg

SEQ ID NO: 22807 - RNA, 20 nt, synthetic construct
  source 1..20: mol_type = other RNA
actcaggctcctcgctatca

SEQ ID NO: 22808 - RNA, 20 nt, synthetic construct
  source 1..20: mol_type = other RNA
gtataacctgactgctgcat

SEQ ID NO: 22809 - RNA, 20 nt, synthetic construct
  source 1..20: mol_type = other RNA
acccgaatagcgcagcagtg

SEQ ID NO: 22810 - RNA, 20 nt, synthetic construct
  source 1..20: mol_type = other RNA
catactgctcaaacatccat

SEQ ID NO: 22811 - RNA, 20 nt, synthetic construct
  source 1..20: mol_type = other RNA
atggtaagcataattgcatc

SEQ ID NO: 22812 - RNA, 20 nt, synthetic construct
  source 1..20: mol_type = other RNA
aagcataattgcatctggtt

SEQ ID NO: 22813 - RNA, 20 nt, synthetic construct
  source 1..20: mol_type = other RNA
gcttgctaatattatcatat

SEQ ID NO: 22814 - RNA, 20 nt, synthetic construct
  source 1..20: mol_type = other RNA
tcgggagtatagttcgtaga

SEQ ID NO: 22815 - RNA, 20 nt, synthetic construct
  source 1..20: mol_type = other RNA
gtataataggatatgtactg

SEQ ID NO: 22816 - RNA, 20 nt, synthetic construct
  source 1..20: mol_type = other RNA
gtataataaattctagccgc

SEQ ID NO: 22817 - RNA, 20 nt, synthetic construct
  source 1..20: mol_type = other RNA
ttgattcatagcagtcttat

SEQ ID NO: 22818 - RNA, 20 nt, synthetic construct
  source 1..20: mol_type = other RNA
tagataaggtaaatcatact

SEQ ID NO: 22819 - RNA, 20 nt, synthetic construct
  source 1..20: mol_type = other RNA
ggaacttgactctgaattcc

SEQ ID NO: 22820 - RNA, 20 nt, synthetic construct
  source 1..20: mol_type = other RNA
cctatatagccgtagtattc

SEQ ID NO: 22821 - RNA, 20 nt, synthetic construct
  source 1..20: mol_type = other RNA
tccaatcgtatagcagtaat

SEQ ID NO: 22822 - RNA, 20 nt, synthetic construct
  source 1..20: mol_type = other RNA
ccaatcgtatagcagtaatc

SEQ ID NO: 22823 - RNA, 20 nt, synthetic construct
  source 1..20: mol_type = other RNA
tagcaattcgtatacaagct

SEQ ID NO: 22824 - RNA, 20 nt, synthetic construct
  source 1..20: mol_type = other RNA
ttcgtatacaagctcggcga

SEQ ID NO: 22825 - RNA, 20 nt, synthetic construct
  source 1..20: mol_type = other RNA
agttactcacatcatatccg

SEQ ID NO: 22826 - RNA, 20 nt, synthetic construct
  source 1..20: mol_type = other RNA
gttactcacatcatatccgt

SEQ ID NO: 22827 - RNA, 20 nt, synthetic construct
  source 1..20: mol_type = other RNA
catatccgtgggtacttgct

SEQ ID NO: 22828 - RNA, 20 nt, synthetic construct
  source 1..20: mol_type = other RNA
tacttgctaggcaccaggag

SEQ ID NO: 22829 - RNA, 20 nt, synthetic construct
  source 1..20: mol_type = other RNA
ttgtgagaagggtgccatcc

SEQ ID NO: 22830 - RNA, 20 nt, synthetic construct
  source 1..20: mol_type = other RNA
ttgacgggtcgcctgttgaa

SEQ ID NO: 22831 - RNA, 20 nt, synthetic construct
  source 1..20: mol_type = other RNA
tgacgggtcgcctgttgaaa

SEQ ID NO: 22832 - RNA, 20 nt, synthetic construct
  source 1..20: mol_type = other RNA
gtcgcctgttgaaagggcgc

SEQ ID NO: 22833 - RNA, 20 nt, synthetic construct
  source 1..20: mol_type = other RNA
gcctgttgaaagggcgcagg

SEQ ID NO: 22834 - RNA, 20 nt, synthetic construct
  source 1..20: mol_type = other RNA
aaagaacaacccggtgcaca

SEQ ID NO: 22835 - RNA, 20 nt, synthetic construct
  source 1..20: mol_type = other RNA
acccggtgcacatggtggga

SEQ ID NO: 22836 - RNA, 20 nt, synthetic construct
  source 1..20: mol_type = other RNA
tggtctgtaacgtcgaaagt

SEQ ID NO: 22837 - RNA, 20 nt, synthetic construct
  source 1..20: mol_type = other RNA
atcgcgcaaatagtccaccg

SEQ ID NO: 22838 - RNA, 20 nt, synthetic construct
  source 1..20: mol_type = other RNA
tatcttatcgctcaataatg

SEQ ID NO: 22839 - RNA, 20 nt, synthetic construct
  source 1..20: mol_type = other RNA
gcccgatctatccatgccca

SEQ ID NO: 22840 - RNA, 20 nt, synthetic construct
  source 1..20: mol_type = other RNA
ctccttctcgcctgaaacct

SEQ ID NO: 22841 - RNA, 20 nt, synthetic construct
  source 1..20: mol_type = other RNA
accttgggctacgtcgcctc

SEQ ID NO: 22842 - RNA, 20 nt, synthetic construct
  source 1..20: mol_type = other RNA
tgcggagcggcgggcatagc

SEQ ID NO: 22843 - RNA, 20 nt, synthetic construct
  source 1..20: mol_type = other RNA
ggcatagctggctcattaat

SEQ ID NO: 22844 - RNA, 20 nt, synthetic construct
  source 1..20: mol_type = other RNA
gctcattaatcggctagcag

SEQ ID NO: 22845 - RNA, 20 nt, synthetic construct
  source 1..20: mol_type = other RNA
taatcggctagcagaggaga

SEQ ID NO: 22846 - RNA, 20 nt, synthetic construct
  source 1..20: mol_type = other RNA
atctaatatcgttgaaaccg

SEQ ID NO: 22847 - RNA, 20 nt, synthetic construct
  source 1..20: mol_type = other RNA
tgaaaccgaggagattgaac

SEQ ID NO: 22848 - RNA, 20 nt, synthetic construct
  source 1..20: mol_type = other RNA
agagttgtctacgatgtact

SEQ ID NO: 22849 - RNA, 20 nt, synthetic construct
  source 1..20: mol_type = other RNA
tacgatgtactcggtgtccc

SEQ ID NO: 22850 - RNA, 20 nt, synthetic construct
  source 1..20: mol_type = other RNA
acatgctgaacagcgtgaaa

SEQ ID NO: 22851 - RNA, 20 nt, synthetic construct
  source 1..20: mol_type = other RNA
ggagcaaatgattctgcagc

SEQ ID NO: 22852 - RNA, 20 nt, synthetic construct
  source 1..20: mol_type = other RNA
ggtggacatgaagctcacgg

SEQ ID NO: 22853 - RNA, 20 nt, synthetic construct
  source 1..20: mol_type = other RNA
gctcacggaggtcattaccc

SEQ ID NO: 22854 - RNA, 20 nt, synthetic construct
  source 1..20: mol_type = other RNA
cgtgaaattcttacaatgga

SEQ ID NO: 22855 - RNA, 20 nt, synthetic construct
  source 1..20: mol_type = other RNA
cgcatgtgctcatctcaagc

SEQ ID NO: 22856 - RNA, 20 nt, synthetic construct
  source 1..20: mol_type = other RNA
gcgttcgggtcttcaatacg

SEQ ID NO: 22857 - RNA, 20 nt, synthetic construct
  source 1..20: mol_type = other RNA
aagtattcgtgtactctaca

SEQ ID NO: 22858 - RNA, 20 nt, synthetic construct
  source 1..20: mol_type = other RNA
catgcttatacagcttcaag

SEQ ID NO: 22859 - RNA, 20 nt, synthetic construct
  source 1..20: mol_type = other RNA
agaggatcgtacggcagatg

SEQ ID NO: 22860 - RNA, 20 nt, synthetic construct
  source 1..20: mol_type = other RNA
gaggatcgtacggcagatgt

SEQ ID NO: 22861 - RNA, 20 nt, synthetic construct
  source 1..20: mol_type = other RNA
acggcagatgtgggcgtcat

SEQ ID NO: 22862 - RNA, 20 nt, synthetic construct
  source 1..20: mol_type = other RNA
gctacaagggcttagcgtgc

SEQ ID NO: 22863 - RNA, 20 nt, synthetic construct
  source 1..20: mol_type = other RNA
tagcgtgcaggacgacacca

SEQ ID NO: 22864 - RNA, 20 nt, synthetic construct
  source 1..20: mol_type = other RNA
gtatgattatgctgccactg

SEQ ID NO: 22865 - RNA, 20 nt, synthetic construct
  source 1..20: mol_type = other RNA
gccactgtggcccgtattga

SEQ ID NO: 22866 - RNA, 20 nt, synthetic construct
  source 1..20: mol_type = other RNA
gcatccctatgcataagcca

SEQ ID NO: 22867 - RNA, 20 nt, synthetic construct
  source 1..20: mol_type = other RNA
aaccgtgataggacgtaccc

SEQ ID NO: 22868 - RNA, 20 nt, synthetic construct
  source 1..20: mol_type = other RNA
gaagagccgaccaacggact

SEQ ID NO: 22869 - RNA, 20 nt, synthetic construct
  source 1..20: mol_type = other RNA
tcaaccctatatgatgaaag

SEQ ID NO: 22870 - RNA, 20 nt, synthetic construct
  source 1..20: mol_type = other RNA
ccacgtgctacaacatgagg

SEQ ID NO: 22871 - RNA, 20 nt, synthetic construct
  source 1..20: mol_type = other RNA
cacgtgctacaacatgaggt

SEQ ID NO: 22872 - RNA, 20 nt, synthetic construct
  source 1..20: mol_type = other RNA
gagccatggaccttcgatta

SEQ ID NO: 22873 - RNA, 20 nt, synthetic construct
  source 1..20: mol_type = other RNA
tatcagtcctgctgtgatag

SEQ ID NO: 22874 - RNA, 20 nt, synthetic construct
  source 1..20: mol_type = other RNA
ggcgctcctacgcagacatc

SEQ ID NO: 22875 - RNA, 20 nt, synthetic construct
  source 1..20: mol_type = other RNA
gcgctcctacgcagacatca

SEQ ID NO: 22876 - RNA, 20 nt, synthetic construct
  source 1..20: mol_type = other RNA
ggatgatccaaggctcatgg

SEQ ID NO: 22877 - RNA, 20 nt, synthetic construct
  source 1..20: mol_type = other RNA
agcctcctatgcatgttgaa

SEQ ID NO: 22878 - RNA, 20 nt, synthetic construct
  source 1..20: mol_type = other RNA
gcatctgtcgtatgaggaaa

SEQ ID NO: 22879 - RNA, 20 nt, synthetic construct
  source 1..20: mol_type = other RNA
ttggcgaagacattattgac

SEQ ID NO: 22880 - RNA, 20 nt, synthetic construct
  source 1..20: mol_type = other RNA
tcatctgatacttcgtgcaa

SEQ ID NO: 22881 - RNA, 20 nt, synthetic construct
  source 1..20: mol_type = other RNA
ttggctatcatcggttacat

SEQ ID NO: 22882 - RNA, 20 nt, synthetic construct
  source 1..20: mol_type = other RNA
tcattcccaacttaatcgta

SEQ ID NO: 22883 - RNA, 20 nt, synthetic construct
  source 1..20: mol_type = other RNA
tccactaaccaaatgagcta

SEQ ID NO: 22884 - RNA, 20 nt, synthetic construct
  source 1..20: mol_type = other RNA
gatgcatagctcttcatccg

SEQ ID NO: 22885 - RNA, 20 nt, synthetic construct
  source 1..20: mol_type = other RNA
tgcatagctcttcatccgtg

SEQ ID NO: 22886 - RNA, 20 nt, synthetic construct
  source 1..20: mol_type = other RNA
tgtagataatggcgggatat

SEQ ID NO: 22887 - RNA, 20 nt, synthetic construct
  source 1..20: mol_type = other RNA
ggcgggatattgggtagtaa

SEQ ID NO: 22888 - RNA, 20 nt, synthetic construct
  source 1..20: mol_type = other RNA
gcgggatattgggtagtaac

SEQ ID NO: 22889 - RNA, 20 nt, synthetic construct
  source 1..20: mol_type = other RNA
ttgggtagtaacgggatact

SEQ ID NO: 22890 - RNA, 20 nt, synthetic construct
  source 1..20: mol_type = other RNA
agtaacgggatactaggtag

SEQ ID NO: 22891 - RNA, 20 nt, synthetic construct
  source 1..20: mol_type = other RNA
cgggatactaggtagtggtt

SEQ ID NO: 22892 - RNA, 20 nt, synthetic construct
  source 1..20: mol_type = other RNA
taggattcaggtgaaggaca

SEQ ID NO: 22893 - RNA, 20 nt, synthetic construct
  source 1..20: mol_type = other RNA
ttgggtggcgggcatggctt

SEQ ID NO: 22894 - RNA, 20 nt, synthetic construct
  source 1..20: mol_type = other RNA
gggttgagtggttgtgttga

SEQ ID NO: 22895 - RNA, 20 nt, synthetic construct
  source 1..20: mol_type = other RNA
gagggacgcatgtagtaaat

SEQ ID NO: 22896 - RNA, 20 nt, synthetic construct
  source 1..20: mol_type = other RNA
tgataacgactgtaaggctt

SEQ ID NO: 22897 - RNA, 20 nt, synthetic construct
  source 1..20: mol_type = other RNA
agtaatggttctctgggaga

SEQ ID NO: 22898 - RNA, 20 nt, synthetic construct
  source 1..20: mol_type = other RNA
ttatatccaacccaatcatt

SEQ ID NO: 22899 - RNA, 20 nt, synthetic construct
  source 1..20: mol_type = other RNA
ttaggcaacagatccctgag

SEQ ID NO: 22900 - RNA, 20 nt, synthetic construct
  source 1..20: mol_type = other RNA
ggtaaagacttaggtctacg

SEQ ID NO: 22901 - RNA, 20 nt, synthetic construct
  source 1..20: mol_type = other RNA
gtaaagacttaggtctacga

SEQ ID NO: 22902 - RNA, 20 nt, synthetic construct
  source 1..20: mol_type = other RNA
taaagacttaggtctacgag

SEQ ID NO: 22903 - RNA, 20 nt, synthetic construct
  source 1..20: mol_type = other RNA
gttcttccttgggagtaaat

SEQ ID NO: 22904 - RNA, 20 nt, synthetic construct
  source 1..20: mol_type = other RNA
ttcagagttcgtgggccgag

SEQ ID NO: 22905 - RNA, 20 nt, synthetic construct
  source 1..20: mol_type = other RNA
agagttcgtgggccgagagg

SEQ ID NO: 22906 - RNA, 20 nt, synthetic construct
  source 1..20: mol_type = other RNA
gggccgagaggaggtaggtt

SEQ ID NO: 22907 - RNA, 20 nt, synthetic construct
  source 1..20: mol_type = other RNA
ctccgtcagcggtatataga

SEQ ID NO: 22908 - RNA, 20 nt, synthetic construct
  source 1..20: mol_type = other RNA
gtcagcggtatatagatgga

SEQ ID NO: 22909 - RNA, 20 nt, synthetic construct
  source 1..20: mol_type = other RNA
gattgcatcagccagttatc

SEQ ID NO: 22910 - RNA, 20 nt, synthetic construct
  source 1..20: mol_type = other RNA
tgcactgataaagaccatag

SEQ ID NO: 22911 - RNA, 20 nt, synthetic construct
  source 1..20: mol_type = other RNA
aagaccatagtggtcttcca

SEQ ID NO: 22912 - RNA, 20 nt, synthetic construct
  source 1..20: mol_type = other RNA
ggaggtgtaatgggtgtgcc

SEQ ID NO: 22913 - RNA, 20 nt, synthetic construct
  source 1..20: mol_type = other RNA
tggagtgttgcagcgccaac

SEQ ID NO: 22914 - RNA, 20 nt, synthetic construct
  source 1..20: mol_type = other RNA
ggagtgttgcagcgccaaca

SEQ ID NO: 22915 - RNA, 20 nt, synthetic construct
  source 1..20: mol_type = other RNA
gagtgttgcagcgccaacag

SEQ ID NO: 22916 - RNA, 20 nt, synthetic construct
  source 1..20: mol_type = other RNA
ttgcggccgcaaataaccta

SEQ ID NO: 22917 - RNA, 20 nt, synthetic construct
  source 1..20: mol_type = other RNA
cattgaaaccgtggataatg

SEQ ID NO: 22918 - RNA, 20 nt, synthetic construct
  source 1..20: mol_type = other RNA
tccgctgcagtaaactctac

SEQ ID NO: 22919 - RNA, 20 nt, synthetic construct
  source 1..20: mol_type = other RNA
gtaaactctacaggattgat

SEQ ID NO: 22920 - RNA, 20 nt, synthetic construct
  source 1..20: mol_type = other RNA
ttcgacgatcttatggacaa

SEQ ID NO: 22921 - RNA, 20 nt, synthetic construct
  source 1..20: mol_type = other RNA
tactgaaatagataagcttc

SEQ ID NO: 22922 - RNA, 20 nt, synthetic construct
  source 1..20: mol_type = other RNA
gcaacatcgaaactattcac

SEQ ID NO: 22923 - RNA, 20 nt, synthetic construct
  source 1..20: mol_type = other RNA
ccctgttaatctagccgccg

SEQ ID NO: 22924 - RNA, 20 nt, synthetic construct
  source 1..20: mol_type = other RNA
ttaacggcgcactacagcaa

SEQ ID NO: 22925 - RNA, 20 nt, synthetic construct
  source 1..20: mol_type = other RNA
cggcgcactacagcaatggt

SEQ ID NO: 22926 - RNA, 20 nt, synthetic construct
  source 1..20: mol_type = other RNA
gcactacagcaatggtcggc

SEQ ID NO: 22927 - RNA, 20 nt, synthetic construct
  source 1..20: mol_type = other RNA
ctacagcaatggtcggcagg

SEQ ID NO: 22928 - RNA, 20 nt, synthetic construct
  source 1..20: mol_type = other RNA
gaagaccctaatgaacccgg

SEQ ID NO: 22929 - RNA, 20 nt, synthetic construct
  source 1..20: mol_type = other RNA
cattaccataccatgcaaca

SEQ ID NO: 22930 - RNA, 20 nt, synthetic construct
  source 1..20: mol_type = other RNA
attatacgctacatgactac

SEQ ID NO: 22931 - RNA, 20 nt, synthetic construct
  source 1..20: mol_type = other RNA
gtgatagctaccgcaccaag

SEQ ID NO: 22932 - RNA, 20 nt, synthetic construct
  source 1..20: mol_type = other RNA
tgatagctaccgcaccaagc

SEQ ID NO: 22933 - RNA, 20 nt, synthetic construct
  source 1..20: mol_type = other RNA
accaagcgggtgcacggctc

SEQ ID NO: 22934 - RNA, 20 nt, synthetic construct
  source 1..20: mol_type = other RNA
ccaagcgggtgcacggctca

SEQ ID NO: 22935 - RNA, 20 nt, synthetic construct
  source 1..20: mol_type = other RNA
caagcgggtgcacggctcag

SEQ ID NO: 22936 - RNA, 20 nt, synthetic construct
  source 1..20: mol_type = other RNA
gtgatagcacccatcatcaa

SEQ ID NO: 22937 - RNA, 20 nt, synthetic construct
  source 1..20: mol_type = other RNA
tgatagcacccatcatcaat

SEQ ID NO: 22938 - RNA, 20 nt, synthetic construct
  source 1..20: mol_type = other RNA
aacccagcgaaacattatcg

SEQ ID NO: 22939 - RNA, 20 nt, synthetic construct
  source 1..20: mol_type = other RNA
ctccgatctcaatcgcagta

SEQ ID NO: 22940 - RNA, 20 nt, synthetic construct
  source 1..20: mol_type = other RNA
cgcgtgcacgcatcttatcc

SEQ ID NO: 22941 - RNA, 20 nt, synthetic construct
  source 1..20: mol_type = other RNA
accgccaatgtctgtaccgc

SEQ ID NO: 22942 - RNA, 20 nt, synthetic construct
  source 1..20: mol_type = other RNA
acaacgccttctatcagatc

SEQ ID NO: 22943 - RNA, 20 nt, synthetic construct
  source 1..20: mol_type = other RNA
caacaaggacattgtacgaa

SEQ ID NO: 22944 - RNA, 20 nt, synthetic construct
  source 1..20: mol_type = other RNA
tggtagacgaagtagaattc

SEQ ID NO: 22945 - RNA, 20 nt, synthetic construct
  source 1..20: mol_type = other RNA
agacgaagtagaattctggt

SEQ ID NO: 22946 - RNA, 20 nt, synthetic construct
  source 1..20: mol_type = other RNA
gtagaattctggttggacgt

SEQ ID NO: 22947 - RNA, 20 nt, synthetic construct
  source 1..20: mol_type = other RNA
aattctggttggacgtcggt

SEQ ID NO: 22948 - RNA, 20 nt, synthetic construct
  source 1..20: mol_type = other RNA
caaatcagggtaggcagacg

SEQ ID NO: 22949 - RNA, 20 nt, synthetic construct
  source 1..20: mol_type = other RNA
aatcagggtaggcagacggg

SEQ ID NO: 22950 - RNA, 20 nt, synthetic construct
  source 1..20: mol_type = other RNA
ataactatgtcatacccaac

SEQ ID NO: 22951 - RNA, 20 nt, synthetic construct
  source 1..20: mol_type = other RNA
caacgggcttaataccattg

SEQ ID NO: 22952 - RNA, 20 nt, synthetic construct
  source 1..20: mol_type = other RNA
attgtggcctatatgatcta

SEQ ID NO: 22953 - RNA, 20 nt, synthetic construct
  source 1..20: mol_type = other RNA
gtggcctatatgatctacgg

SEQ ID NO: 22954 - RNA, 20 nt, synthetic construct
  source 1..20: mol_type = other RNA
ctacggcggctacaatcagg

SEQ ID NO: 22955 - RNA, 20 nt, synthetic construct
  source 1..20: mol_type = other RNA
gaaagcgatatagagtcgtt

SEQ ID NO: 22956 - RNA, 20 nt, synthetic construct
  source 1..20: mol_type = other RNA
aactcaacaaatacatcgac

SEQ ID NO: 22957 - RNA, 20 nt, synthetic construct
  source 1..20: mol_type = other RNA
atcgaccggtctgtcatgta

SEQ ID NO: 22958 - RNA, 20 nt, synthetic construct
  source 1..20: mol_type = other RNA
catgtacggcttcgatgagc

SEQ ID NO: 22959 - RNA, 20 nt, synthetic construct
  source 1..20: mol_type = other RNA
cttcgatgagccggccgtcg

SEQ ID NO: 22960 - RNA, 20 nt, synthetic construct
  source 1..20: mol_type = other RNA
gacaagatgagttctcgcag

SEQ ID NO: 22961 - RNA, 20 nt, synthetic construct
  source 1..20: mol_type = other RNA
acaagatgagttctcgcagc

SEQ ID NO: 22962 - RNA, 20 nt, synthetic construct
  source 1..20: mol_type = other RNA
gagttctcgcagcgggaaca

SEQ ID NO: 22963 - RNA, 20 nt, synthetic construct
  source 1..20: mol_type = other RNA
gaacaagggcattgcggcgc

SEQ ID NO: 22964 - RNA, 20 nt, synthetic construct
  source 1..20: mol_type = other RNA
tggtctagcaaatgccctac

SEQ ID NO: 22965 - RNA, 20 nt, synthetic construct
  source 1..20: mol_type = other RNA
ggtctagcaaatgccctaca

SEQ ID NO: 22966 - RNA, 20 nt, synthetic construct
  source 1..20: mol_type = other RNA
caagaaggtctacgcttcaa

SEQ ID NO: 22967 - RNA, 20 nt, synthetic construct
  source 1..20: mol_type = other RNA
cgatacgccgttgcaagcta

SEQ ID NO: 22968 - RNA, 20 nt, synthetic construct
  source 1..20: mol_type = other RNA
gatacgccgttgcaagctat

SEQ ID NO: 22969 - RNA, 20 nt, synthetic construct
  source 1..20: mol_type = other RNA
cgttgcaagctatgggccca

SEQ ID NO: 22970 - RNA, 20 nt, synthetic construct
  source 1..20: mol_type = other RNA
tgccctcacaggccagccgt

SEQ ID NO: 22971 - RNA, 20 nt, synthetic construct
  source 1..20: mol_type = other RNA
ctcacaggccagccgttgga

SEQ ID NO: 22972 - RNA, 20 nt, synthetic construct
  source 1..20: mol_type = other RNA
gacggcaaacgatcgcacgg

SEQ ID NO: 22973 - RNA, 20 nt, synthetic construct
  source 1..20: mol_type = other RNA
atcgcacggaggtcttcgtc

SEQ ID NO: 22974 - RNA, 20 nt, synthetic construct
  source 1..20: mol_type = other RNA
tcgcacggaggtcttcgtct

SEQ ID NO: 22975 - RNA, 20 nt, synthetic construct
  source 1..20: mol_type = other RNA
aatggagcattgggtgctta

SEQ ID NO: 22976 - RNA, 20 nt, synthetic construct
  source 1..20: mol_type = other RNA
gcattgggtgcttacggcgc

SEQ ID NO: 22977 - RNA, 20 nt, synthetic construct
  source 1..20: mol_type = other RNA
cattgggtgcttacggcgca

SEQ ID NO: 22978 - RNA, 20 nt, synthetic construct
  source 1..20: mol_type = other RNA
aaatcgcacgacgactcgga

SEQ ID NO: 22979 - RNA, 20 nt, synthetic construct
  source 1..20: mol_type = other RNA
gtgcatgaactgtgatgtcc

SEQ ID NO: 22980 - RNA, 20 nt, synthetic construct
  source 1..20: mol_type = other RNA
tgtgatgtccaggccgatat

SEQ ID NO: 22981 - RNA, 20 nt, synthetic construct
  source 1..20: mol_type = other RNA
tgtccaggccgatatcggca

SEQ ID NO: 22982 - RNA, 20 nt, synthetic construct
  source 1..20: mol_type = other RNA
atagtcaaacgccgtaattc

SEQ ID NO: 22983 - RNA, 20 nt, synthetic construct
  source 1..20: mol_type = other RNA
ctccaacaacgattcgctga

SEQ ID NO: 22984 - RNA, 20 nt, synthetic construct
  source 1..20: mol_type = other RNA
tccaacaacgattcgctgac

SEQ ID NO: 22985 - RNA, 20 nt, synthetic construct
  source 1..20: mol_type = other RNA
ggccattcctcgacaaagtt

SEQ ID NO: 22986 - RNA, 20 nt, synthetic construct
  source 1..20: mol_type = other RNA
gccattcctcgacaaagttg

SEQ ID NO: 22987 - RNA, 20 nt, synthetic construct
  source 1..20: mol_type = other RNA
gagtgcgctggtgcaataga

SEQ ID NO: 22988 - RNA, 20 nt, synthetic construct
  source 1..20: mol_type = other RNA
agtgcgctggtgcaatagaa

SEQ ID NO: 22989 - RNA, 20 nt, synthetic construct
  source 1..20: mol_type = other RNA
taactgccggaatggcatat

SEQ ID NO: 22990 - RNA, 20 nt, synthetic construct
  source 1..20: mol_type = other RNA
ttaatcacataccaatggtt

SEQ ID NO: 22991 - RNA, 20 nt, synthetic construct
  source 1..20: mol_type = other RNA
ataccaatggttgggaatct

SEQ ID NO: 22992 - RNA, 20 nt, synthetic construct
  source 1..20: mol_type = other RNA
gtgtaacgagtgaggtattc

SEQ ID NO: 22993 - RNA, 20 nt, synthetic construct
  source 1..20: mol_type = other RNA
gctgtgctccgccacattgt

SEQ ID NO: 22994 - RNA, 20 nt, synthetic construct
  source 1..20: mol_type = other RNA
ttgcacgtagagggccgctg

SEQ ID NO: 22995 - RNA, 20 nt, synthetic construct
  source 1..20: mol_type = other RNA
gctgcggtaaagctgcgttg

SEQ ID NO: 22996 - RNA, 20 nt, synthetic construct
  source 1..20: mol_type = other RNA
acagttcacttcctcccgca

SEQ ID NO: 22997 - RNA, 20 nt, synthetic construct
  source 1..20: mol_type = other RNA
cttcatctacgacaactgca

SEQ ID NO: 22998 - RNA, 20 nt, synthetic construct
  source 1..20: mol_type = other RNA
cttgggtcgtagctgtatac

SEQ ID NO: 22999 - RNA, 20 nt, synthetic construct
  source 1..20: mol_type = other RNA
tagtaagacgcgatccattc

SEQ ID NO: 23000 - RNA, 20 nt, synthetic construct
  source 1..20: mol_type = other RNA
cgcgatccattctggtaaat

SEQ ID NO: 23001 - RNA, 20 nt, synthetic construct
  source 1..20: mol_type = other RNA
atagagcatcccggaatgca

SEQ ID NO: 23002 - RNA, 20 nt, synthetic construct
  source 1..20: mol_type = other RNA
tcttctgttcgtcagagaat

SEQ ID NO: 23003 - RNA, 20 nt, synthetic construct
  source 1..20: mol_type = other RNA
tatccgtcatgacggtcata

SEQ ID NO: 23004 - RNA, 20 nt, synthetic construct
  source 1..20: mol_type = other RNA
cgtcatgacggtcataaggt

SEQ ID NO: 23005 - RNA, 20 nt, synthetic construct
  source 1..20: mol_type = other RNA
ctcccaaggagaagccgtag

SEQ ID NO: 23006 - RNA, 20 nt, synthetic construct
  source 1..20: mol_type = other RNA
catgataattaacgttatca

SEQ ID NO: 23007 - RNA, 20 nt, synthetic construct
  source 1..20: mol_type = other RNA
agtccctacgcttgttgtaa

SEQ ID NO: 23008 - RNA, 20 nt, synthetic construct
  source 1..20: mol_type = other RNA
ctacgaaagagtcatcgttc

SEQ ID NO: 23009 - RNA, 20 nt, synthetic construct
  source 1..20: mol_type = other RNA
cgaaagagtcatcgttcagg

SEQ ID NO: 23010 - RNA, 20 nt, synthetic construct
  source 1..20: mol_type = other RNA
atatgcttggacgcaaacct

SEQ ID NO: 23011 - RNA, 20 nt, synthetic construct
  source 1..20: mol_type = other RNA
ataatgtatcgtattattgg

SEQ ID NO: 23012 - RNA, 20 nt, synthetic construct
  source 1..20: mol_type = other RNA
ttcacgtatagtaaggaaac

SEQ ID NO: 23013 - RNA, 20 nt, synthetic construct
  source 1..20: mol_type = other RNA
tagtaaggaaacaggtaggc

SEQ ID NO: 23014 - RNA, 20 nt, synthetic construct
  source 1..20: mol_type = other RNA
atctatggctcgaaacaatg

SEQ ID NO: 23015 - RNA, 20 nt, synthetic construct
  source 1..20: mol_type = other RNA
ggtcgccgacaccggcgcta

SEQ ID NO: 23016 - RNA, 20 nt, synthetic construct
  source 1..20: mol_type = other RNA
ggactatgtaaacattgcct

SEQ ID NO: 23017 - RNA, 20 nt, synthetic construct
  source 1..20: mol_type = other RNA
ggccgtgtccaaataagccg

SEQ ID NO: 23018 - RNA, 20 nt, synthetic construct
  source 1..20: mol_type = other RNA
gctcactatgttacaaactc

SEQ ID NO: 23019 - RNA, 20 nt, synthetic construct
  source 1..20: mol_type = other RNA
ggaattaaacttccatcaat

SEQ ID NO: 23020 - RNA, 20 nt, synthetic construct
  source 1..20: mol_type = other RNA
attatgctgttaactaagtg

SEQ ID NO: 23021 - RNA, 20 nt, synthetic construct
  source 1..20: mol_type = other RNA
aaagtgctgggtctacgcta

SEQ ID NO: 23022 - RNA, 20 nt, synthetic construct
  source 1..20: mol_type = other RNA
ggcttcattggcctcatcga

SEQ ID NO: 23023 - RNA, 20 nt, synthetic construct
  source 1..20: mol_type = other RNA
caatacgtgtcgtgcttgtt

SEQ ID NO: 23024 - RNA, 20 nt, synthetic construct
  source 1..20: mol_type = other RNA
ggcagtggtctacaaacatg

SEQ ID NO: 23025 - RNA, 20 nt, synthetic construct
  source 1..20: mol_type = other RNA
aaacgacataatggaggccg

SEQ ID NO: 23026 - RNA, 20 nt, synthetic construct
  source 1..20: mol_type = other RNA
atgacagtaataggaaccgg

SEQ ID NO: 23027 - RNA, 20 nt, synthetic construct
  source 1..20: mol_type = other RNA
ggacgagcaccgtaagtacc

SEQ ID NO: 23028 - RNA, 20 nt, synthetic construct
  source 1..20: mol_type = other RNA
taccgatcacggatctcggc

SEQ ID NO: 23029 - RNA, 20 nt, synthetic construct
  source 1..20: mol_type = other RNA
cgttctacgtgtatatagat

SEQ ID NO: 23030 - RNA, 20 nt, synthetic construct
  source 1..20: mol_type = other RNA
tgtatatagattggaggtaa

SEQ ID NO: 23031 - RNA, 20 nt, synthetic construct
  source 1..20: mol_type = other RNA
ggaggttgcggtgggcataa

SEQ ID NO: 23032 - RNA, 20 nt, synthetic construct
  source 1..20: mol_type = other RNA
ctgtgccacgcgttcttccc

SEQ ID NO: 23033 - RNA, 20 nt, synthetic construct
  source 1..20: mol_type = other RNA
tgccacgcgttcttcccagg

SEQ ID NO: 23034 - RNA, 20 nt, synthetic construct
  source 1..20: mol_type = other RNA
aatcaccgcagcgaacccat

SEQ ID NO: 23035 - RNA, 20 nt, synthetic construct
  source 1..20: mol_type = other RNA
accgcagcgaacccataggt

SEQ ID NO: 23036 - RNA, 20 nt, synthetic construct
  source 1..20: mol_type = other RNA
ccgcagcgaacccataggtc

SEQ ID NO: 23037 - RNA, 20 nt, synthetic construct
  source 1..20: mol_type = other RNA
aagttctatggatcgtcgca

SEQ ID NO: 23038 - RNA, 20 nt, synthetic construct
  source 1..20: mol_type = other RNA
gtagtatagggccgcatgga

SEQ ID NO: 23039 - RNA, 20 nt, synthetic construct
  source 1..20: mol_type = other RNA
cgcatggatggcctcatcca

SEQ ID NO: 23040 - RNA, 20 nt, synthetic construct
  source 1..20: mol_type = other RNA
aagacgcaaacacgtcggct

SEQ ID NO: 23041 - RNA, 20 nt, synthetic construct
  source 1..20: mol_type = other RNA
acgcatattgcttctccgcg

SEQ ID NO: 23042 - RNA, 20 nt, synthetic construct
  source 1..20: mol_type = other RNA
ctgatgcttctatgagccca

SEQ ID NO: 23043 - RNA, 20 nt, synthetic construct
  source 1..20: mol_type = other RNA
ttccttggccgtcgtaacac

SEQ ID NO: 23044 - RNA, 20 nt, synthetic construct
  source 1..20: mol_type = other RNA
cgtcgcctctgttatgtatt

SEQ ID NO: 23045 - RNA, 20 nt, synthetic construct
  source 1..20: mol_type = other RNA
ccatagaccgtacttgagat

SEQ ID NO: 23046 - RNA, 20 nt, synthetic construct
  source 1..20: mol_type = other RNA
catagaccgtacttgagatt

SEQ ID NO: 23047 - RNA, 20 nt, synthetic construct
  source 1..20: mol_type = other RNA
atagaccgtacttgagattg

SEQ ID NO: 23048 - RNA, 20 nt, synthetic construct
  source 1..20: mol_type = other RNA
tagaccgtacttgagattgg

SEQ ID NO: 23049 - RNA, 20 nt, synthetic construct
  source 1..20: mol_type = other RNA
ctggttcgcgtagcattgtg

SEQ ID NO: 23050 - RNA, 20 nt, synthetic construct
  source 1..20: mol_type = other RNA
gccgccgcctgaaatgatgc

SEQ ID NO: 23051 - RNA, 20 nt, synthetic construct
  source 1..20: mol_type = other RNA
gtgcctgcattgaacatggt

SEQ ID NO: 23052 - RNA, 20 nt, synthetic construct
  source 1..20: mol_type = other RNA
tgatgacgtgccgggaaagc

SEQ ID NO: 23053 - RNA, 20 nt, synthetic construct
  source 1..20: mol_type = other RNA
tcccattccatagatcataa

SEQ ID NO: 23054 - RNA, 20 nt, synthetic construct
  source 1..20: mol_type = other RNA
cataatggcgacgcgcatat

SEQ ID NO: 23055 - RNA, 20 nt, synthetic construct
  source 1..20: mol_type = other RNA
cgcgcatataggcgtcctgc

SEQ ID NO: 23056 - RNA, 20 nt, synthetic construct
  source 1..20: mol_type = other RNA
tgtaaacgacgtccacaaac

SEQ ID NO: 23057 - RNA, 20 nt, synthetic construct
  source 1..20: mol_type = other RNA
gtaaacgacgtccacaaact

SEQ ID NO: 23058 - RNA, 20 nt, synthetic construct
  source 1..20: mol_type = other RNA
taaacgacgtccacaaactg

SEQ ID NO: 23059 - RNA, 20 nt, synthetic construct
  source 1..20: mol_type = other RNA
aaacgacgtccacaaactgg

SEQ ID NO: 23060 - RNA, 20 nt, synthetic construct
  source 1..20: mol_type = other RNA
acaccgaaagtcgcgccgca

SEQ ID NO: 23061 - RNA, 20 nt, synthetic construct
  source 1..20: mol_type = other RNA
caccgaaagtcgcgccgcaa

SEQ ID NO: 23062 - RNA, 20 nt, synthetic construct
  source 1..20: mol_type = other RNA
gtgtaaggacattgatgatt

SEQ ID NO: 23063 - RNA, 20 nt, synthetic construct
  source 1..20: mol_type = other RNA
aacgctgatcccggatgaga

SEQ ID NO: 23064 - RNA, 20 nt, synthetic construct
  source 1..20: mol_type = other RNA
gaacactctgggtgagcggc

SEQ ID NO: 23065 - RNA, 20 nt, synthetic construct
  source 1..20: mol_type = other RNA
gtgggcttcgccgccgtaga

SEQ ID NO: 23066 - RNA, 20 nt, synthetic construct
  source 1..20: mol_type = other RNA
ttacgtgtataacattcccg

SEQ ID NO: 23067 - RNA, 20 nt, synthetic construct
  source 1..20: mol_type = other RNA
gcagtatcagaactgtgtta

SEQ ID NO: 23068 - RNA, 20 nt, synthetic construct
  source 1..20: mol_type = other RNA
attggaccgagttcgaatcc

SEQ ID NO: 23069 - RNA, 20 nt, synthetic construct
  source 1..20: mol_type = other RNA
gaacactctgttgcttaatt

SEQ ID NO: 23070 - RNA, 20 nt, synthetic construct
  source 1..20: mol_type = other RNA
gcttaattgggacaatgttc

SEQ ID NO: 23071 - RNA, 20 nt, synthetic construct
  source 1..20: mol_type = other RNA
ggccgcattaatatgataaa

SEQ ID NO: 23072 - RNA, 20 nt, synthetic construct
  source 1..20: mol_type = other RNA
aacgctgcgttatctactta

SEQ ID NO: 23073 - RNA, 20 nt, synthetic construct
  source 1..20: mol_type = other RNA
acgctgcgttatctacttat

SEQ ID NO: 23074 - RNA, 20 nt, synthetic construct
  source 1..20: mol_type = other RNA
gggccaatgagaatccgcgc

SEQ ID NO: 23075 - RNA, 20 nt, synthetic construct
  source 1..20: mol_type = other RNA
cctcgaaactattgagacaa

SEQ ID NO: 23076 - RNA, 20 nt, synthetic construct
  source 1..20: mol_type = other RNA
ggcctgaaagtcaacattga

SEQ ID NO: 23077 - RNA, 20 nt, synthetic construct
  source 1..20: mol_type = other RNA
aagtcaacattgatggtact

SEQ ID NO: 23078 - RNA, 20 nt, synthetic construct
  source 1..20: mol_type = other RNA
actaggaatgcccaggttct

SEQ ID NO: 23079 - RNA, 20 nt, synthetic construct
  source 1..20: mol_type = other RNA
gcactcaggaacttcatgcc

SEQ ID NO: 23080 - RNA, 20 nt, synthetic construct
  source 1..20: mol_type = other RNA
gaacttcatgccaggcggtg

SEQ ID NO: 23081 - RNA, 20 nt, synthetic construct
  source 1..20: mol_type = other RNA
gccaggcggtgtggaattcg

SEQ ID NO: 23082 - RNA, 20 nt, synthetic construct
  source 1..20: mol_type = other RNA
ttataggtgcatcgttcctc

SEQ ID NO: 23083 - RNA, 20 nt, synthetic construct
  source 1..20: mol_type = other RNA
tataggtgcatcgttcctca

SEQ ID NO: 23084 - RNA, 20 nt, synthetic construct
  source 1..20: mol_type = other RNA
caaagacgccaataaccatc

SEQ ID NO: 23085 - RNA, 20 nt, synthetic construct
  source 1..20: mol_type = other RNA
caataaccatctggagtcca

SEQ ID NO: 23086 - RNA, 20 nt, synthetic construct
  source 1..20: mol_type = other RNA
ggagtccacggtgatcacta

SEQ ID NO: 23087 - RNA, 20 nt, synthetic construct
  source 1..20: mol_type = other RNA
tgaaacacaacctactaccc

SEQ ID NO: 23088 - RNA, 20 nt, synthetic construct
  source 1..20: mol_type = other RNA
cgtggcggttcatccctggc

SEQ ID NO: 23089 - RNA, 20 nt, synthetic construct
  source 1..20: mol_type = other RNA
ttacataaagttgggcacac

SEQ ID NO: 23090 - RNA, 20 nt, synthetic construct
  source 1..20: mol_type = other RNA
ttggccgctaggctccatga

SEQ ID NO: 23091 - RNA, 20 nt, synthetic construct
  source 1..20: mol_type = other RNA
gatgaatgattccacgatag

SEQ ID NO: 23092 - RNA, 20 nt, synthetic construct
  source 1..20: mol_type = other RNA
ctctgatccgctgataagca

SEQ ID NO: 23093 - RNA, 20 nt, synthetic construct
  source 1..20: mol_type = other RNA
tgagacacggactgcaatcg

SEQ ID NO: 23094 - RNA, 20 nt, synthetic construct
  source 1..20: mol_type = other RNA
cacggactgcaatcgaggat

SEQ ID NO: 23095 - RNA, 20 nt, synthetic construct
  source 1..20: mol_type = other RNA
cagaaggaggcggccaatat

SEQ ID NO: 23096 - RNA, 20 nt, synthetic construct
  source 1..20: mol_type = other RNA
ggcggccaatatgggctatc

SEQ ID NO: 23097 - RNA, 20 nt, synthetic construct
  source 1..20: mol_type = other RNA
tatcaggagctgcggcgaag

SEQ ID NO: 23098 - RNA, 20 nt, synthetic construct
  source 1..20: mol_type = other RNA
aggagctgcggcgaagtgga

SEQ ID NO: 23099 - RNA, 20 nt, synthetic construct
  source 1..20: mol_type = other RNA
ggagctgcggcgaagtggaa

SEQ ID NO: 23100 - RNA, 20 nt, synthetic construct
  source 1..20: mol_type = other RNA
tgccgggcctgtccctacta

SEQ ID NO: 23101 - RNA, 20 nt, synthetic construct
  source 1..20: mol_type = other RNA
gtccctactacggcagactc

SEQ ID NO: 23102 - RNA, 20 nt, synthetic construct
  source 1..20: mol_type = other RNA
ctaccaatcctccacgctac

SEQ ID NO: 23103 - RNA, 20 nt, synthetic construct
  source 1..20: mol_type = other RNA
ctatctgcgagaaggcatag

SEQ ID NO: 23104 - RNA, 20 nt, synthetic construct
  source 1..20: mol_type = other RNA
ctgcgagaaggcatagaggc

SEQ ID NO: 23105 - RNA, 20 nt, synthetic construct
  source 1..20: mol_type = other RNA
aatggtagccgcgcccaaat

SEQ ID NO: 23106 - RNA, 20 nt, synthetic construct
  source 1..20: mol_type = other RNA
attcacccgtgatattaaac

SEQ ID NO: 23107 - RNA, 20 nt, synthetic construct
  source 1..20: mol_type = other RNA
cagggagctatacgcggagt

SEQ ID NO: 23108 - RNA, 20 nt, synthetic construct
  source 1..20: mol_type = other RNA
tacgcggagttggtagacca

SEQ ID NO: 23109 - RNA, 20 nt, synthetic construct
  source 1..20: mol_type = other RNA
cgcggagttggtagaccaag

SEQ ID NO: 23110 - RNA, 20 nt, synthetic construct
  source 1..20: mol_type = other RNA
tcactcaaccctgccgcgac

SEQ ID NO: 23111 - RNA, 20 nt, synthetic construct
  source 1..20: mol_type = other RNA
agaggttccggaactaaacg

SEQ ID NO: 23112 - RNA, 20 nt, synthetic construct
  source 1..20: mol_type = other RNA
atgcagaccgctgaacaagc

SEQ ID NO: 23113 - RNA, 20 nt, synthetic construct
  source 1..20: mol_type = other RNA
gcctatccgataaactggat

SEQ ID NO: 23114 - RNA, 20 nt, synthetic construct
  source 1..20: mol_type = other RNA
cctatccgataaactggatc

SEQ ID NO: 23115 - RNA, 20 nt, synthetic construct
  source 1..20: mol_type = other RNA
ctatccgataaactggatcg

SEQ ID NO: 23116 - RNA, 20 nt, synthetic construct
  source 1..20: mol_type = other RNA
gcacgtcacgccatacgcta

SEQ ID NO: 23117 - RNA, 20 nt, synthetic construct
  source 1..20: mol_type = other RNA
cgccatacgctatggtacgc

SEQ ID NO: 23118 - RNA, 20 nt, synthetic construct
  source 1..20: mol_type = other RNA
gccatacgctatggtacgca

SEQ ID NO: 23119 - RNA, 20 nt, synthetic construct
  source 1..20: mol_type = other RNA
cccgcagcgagagacttcct

SEQ ID NO: 23120 - RNA, 20 nt, synthetic construct
  source 1..20: mol_type = other RNA
cagcgagagacttccttgga

SEQ ID NO: 23121 - RNA, 20 nt, synthetic construct
  source 1..20: mol_type = other RNA
ggttcgacacatggtataaa

SEQ ID NO: 23122 - RNA, 20 nt, synthetic construct
  source 1..20: mol_type = other RNA
gccttaccaggtgtcggacc

SEQ ID NO: 23123 - RNA, 20 nt, synthetic construct
  source 1..20: mol_type = other RNA
ttgcaagattggacaacccg

SEQ ID NO: 23124 - RNA, 20 nt, synthetic construct
  source 1..20: mol_type = other RNA
tggacaacccgtggtgttgg

SEQ ID NO: 23125 - RNA, 20 nt, synthetic construct
  source 1..20: mol_type = other RNA
gtgttggcgggccttatccc

SEQ ID NO: 23126 - RNA, 20 nt, synthetic construct
  source 1..20: mol_type = other RNA
tgttgccattgatattcatc

SEQ ID NO: 23127 - RNA, 20 nt, synthetic construct
  source 1..20: mol_type = other RNA
gttgccattgatattcatca

SEQ ID NO: 23128 - RNA, 20 nt, synthetic construct
  source 1..20: mol_type = other RNA
gacgcccatggaaaggctgt

SEQ ID NO: 23129 - RNA, 20 nt, synthetic construct
  source 1..20: mol_type = other RNA
caacgcgatggccgaagcta

SEQ ID NO: 23130 - RNA, 20 nt, synthetic construct
  source 1..20: mol_type = other RNA
gcacaatcttaagtggagaa

SEQ ID NO: 23131 - RNA, 20 nt, synthetic construct
  source 1..20: mol_type = other RNA
tactggcctggatatgccaa

SEQ ID NO: 23132 - RNA, 20 nt, synthetic construct
  source 1..20: mol_type = other RNA
ccaagaattaccgcacatat

SEQ ID NO: 23133 - RNA, 20 nt, synthetic construct
  source 1..20: mol_type = other RNA
ttaccgcacatatgggaaag

SEQ ID NO: 23134 - RNA, 20 nt, synthetic construct
  source 1..20: mol_type = other RNA
ttcatgtggatatgcatcta

SEQ ID NO: 23135 - RNA, 20 nt, synthetic construct
  source 1..20: mol_type = other RNA
aaataattaaccctcatagg

SEQ ID NO: 23136 - RNA, 20 nt, synthetic construct
  source 1..20: mol_type = other RNA
gtgatgaaggccgcaatacg

SEQ ID NO: 23137 - RNA, 20 nt, synthetic construct
  source 1..20: mol_type = other RNA
attgttgccaacaatacatg

SEQ ID NO: 23138 - RNA, 20 nt, synthetic construct
  source 1..20: mol_type = other RNA
ttcataagatacttatacac

SEQ ID NO: 23139 - RNA, 20 nt, synthetic construct
  source 1..20: mol_type = other RNA
gccgctaacatcatcgccag

SEQ ID NO: 23140 - RNA, 20 nt, synthetic construct
  source 1..20: mol_type = other RNA
aacatcatcgccagaggagc

SEQ ID NO: 23141 - RNA, 20 nt, synthetic construct
  source 1..20: mol_type = other RNA
tatattgggcgacataatgt

SEQ ID NO: 23142 - RNA, 20 nt, synthetic construct
  source 1..20: mol_type = other RNA
gcgacataatgttggtaaat

SEQ ID NO: 23143 - RNA, 20 nt, synthetic construct
  source 1..20: mol_type = other RNA
ctacgatcattaaagataca

SEQ ID NO: 23144 - RNA, 20 nt, synthetic construct
  source 1..20: mol_type = other RNA
gtgatctgccaaatataggt

SEQ ID NO: 23145 - RNA, 20 nt, synthetic construct
  source 1..20: mol_type = other RNA
tggaatacttattaccatcg

SEQ ID NO: 23146 - RNA, 20 nt, synthetic construct
  source 1..20: mol_type = other RNA
ggaatacttattaccatcga

SEQ ID NO: 23147 - RNA, 20 nt, synthetic construct
  source 1..20: mol_type = other RNA
attaccatcgagggaatcaa

SEQ ID NO: 23148 - RNA, 20 nt, synthetic construct
  source 1..20: mol_type = other RNA
catcgagggaatcaatggtg

SEQ ID NO: 23149 - RNA, 20 nt, synthetic construct
  source 1..20: mol_type = other RNA
atcgagggaatcaatggtgt

SEQ ID NO: 23150 - RNA, 20 nt, synthetic construct
  source 1..20: mol_type = other RNA
cctaatccagacacgaccac

SEQ ID NO: 23151 - RNA, 20 nt, synthetic construct
  source 1..20: mol_type = other RNA
aatccagacacgaccaccgg

SEQ ID NO: 23152 - RNA, 20 nt, synthetic construct
  source 1..20: mol_type = other RNA
caccggtggccttatattgc

SEQ ID NO: 23153 - RNA, 20 nt, synthetic construct
  source 1..20: mol_type = other RNA
ttagcatatgctcaagcaga

SEQ ID NO: 23154 - RNA, 20 nt, synthetic construct
  source 1..20: mol_type = other RNA
tattccggcaactcttaata

SEQ ID NO: 23155 - RNA, 20 nt, synthetic construct
  source 1..20: mol_type = other RNA
tgaataggctctcctgttgc

SEQ ID NO: 23156 - RNA, 20 nt, synthetic construct
  source 1..20: mol_type = other RNA
gggttatggccctggcgagc

SEQ ID NO: 23157 - RNA, 20 nt, synthetic construct
  source 1..20: mol_type = other RNA
aacgacggtgaacttgattc

SEQ ID NO: 23158 - RNA, 20 nt, synthetic construct
  source 1..20: mol_type = other RNA
acgacggtgaacttgattcc

SEQ ID NO: 23159 - RNA, 20 nt, synthetic construct
  source 1..20: mol_type = other RNA
ctgggtatctgccgctacta

SEQ ID NO: 23160 - RNA, 20 nt, synthetic construct
  source 1..20: mol_type = other RNA
taaggagtaaagctcttgct

SEQ ID NO: 23161 - RNA, 20 nt, synthetic construct
  source 1..20: mol_type = other RNA
aagctcttgcttggtaattg

SEQ ID NO: 23162 - RNA, 20 nt, synthetic construct
  source 1..20: mol_type = other RNA
agctcttgcttggtaattgt

SEQ ID NO: 23163 - RNA, 20 nt, synthetic construct
  source 1..20: mol_type = other RNA
aatcaaagcttcgcaatcca

SEQ ID NO: 23164 - RNA, 20 nt, synthetic construct
  source 1..20: mol_type = other RNA
gaaataacatgctactgttg

SEQ ID NO: 23165 - RNA, 20 nt, synthetic construct
  source 1..20: mol_type = other RNA
cgtgcaaccttgggcattat

SEQ ID NO: 23166 - RNA, 20 nt, synthetic construct
  source 1..20: mol_type = other RNA
agattgaggcttcatggtat

SEQ ID NO: 23167 - RNA, 20 nt, synthetic construct
  source 1..20: mol_type = other RNA
agatgatgaatcaacgtctg

SEQ ID NO: 23168 - RNA, 20 nt, synthetic construct
  source 1..20: mol_type = other RNA
gatgatgaatcaacgtctgt

SEQ ID NO: 23169 - RNA, 20 nt, synthetic construct
  source 1..20: mol_type = other RNA
ttgtacaatgtctgtatagg

SEQ ID NO: 23170 - RNA, 20 nt, synthetic construct
  source 1..20: mol_type = other RNA
gacattgtgtacgagttgtt

SEQ ID NO: 23171 - RNA, 20 nt, synthetic construct
  source 1..20: mol_type = other RNA
atgcttgtacctgatagccg

SEQ ID NO: 23172 - RNA, 20 nt, synthetic construct
  source 1..20: mol_type = other RNA
cctgatagccgcggatagaa

SEQ ID NO: 23173 - RNA, 20 nt, synthetic construct
  source 1..20: mol_type = other RNA
ctcctgccgccgcagttcga

SEQ ID NO: 23174 - RNA, 20 nt, synthetic construct
  source 1..20: mol_type = other RNA
aggtgatatgatagcaaatt

SEQ ID NO: 23175 - RNA, 20 nt, synthetic construct
  source 1..20: mol_type = other RNA
ttcttctgccgccattctta

SEQ ID NO: 23176 - RNA, 20 nt, synthetic construct
  source 1..20: mol_type = other RNA
cattcttaaggcctcgttga

SEQ ID NO: 23177 - RNA, 20 nt, synthetic construct
  source 1..20: mol_type = other RNA
ttgaagtacatgcttaccca

SEQ ID NO: 23178 - RNA, 20 nt, synthetic construct
  source 1..20: mol_type = other RNA
tgaagtacatgcttacccaa

SEQ ID NO: 23179 - RNA, 20 nt, synthetic construct
  source 1..20: mol_type = other RNA
tgaatagagcagcatctacc

SEQ ID NO: 23180 - RNA, 20 nt, synthetic construct
  source 1..20: mol_type = other RNA
aggcccgcgattctacagca

SEQ ID NO: 23181 - RNA, 20 nt, synthetic construct
  source 1..20: mol_type = other RNA
cagaagcatgcgaactacat

SEQ ID NO: 23182 - RNA, 20 nt, synthetic construct
  source 1..20: mol_type = other RNA
catgttggagaaggcatata

SEQ ID NO: 23183 - RNA, 20 nt, synthetic construct
  source 1..20: mol_type = other RNA
gaatatgccagtcctgaatt

SEQ ID NO: 23184 - RNA, 20 nt, synthetic construct
  source 1..20: mol_type = other RNA
cttccgacagaggtcctgta

SEQ ID NO: 23185 - RNA, 20 nt, synthetic construct
  source 1..20: mol_type = other RNA
cgtgtaccctatagataata

SEQ ID NO: 23186 - RNA, 20 nt, synthetic construct
  source 1..20: mol_type = other RNA
ggacacattcatcttatcaa

SEQ ID NO: 23187 - RNA, 20 nt, synthetic construct
  source 1..20: mol_type = other RNA
tgtcgtgacagtcttcgatt

SEQ ID NO: 23188 - RNA, 20 nt, synthetic construct
  source 1..20: mol_type = other RNA
ggtcatagagcttacgtatt

SEQ ID NO: 23189 - RNA, 20 nt, synthetic construct
  source 1..20: mol_type = other RNA
actctccaaagctcctatga

SEQ ID NO: 23190 - RNA, 20 nt, synthetic construct
  source 1..20: mol_type = other RNA
cattcttagagcttcattga

SEQ ID NO: 23191 - RNA, 20 nt, synthetic construct
  source 1..20: mol_type = other RNA
attcttagagcttcattgat

SEQ ID NO: 23192 - RNA, 20 nt, synthetic construct
  source 1..20: mol_type = other RNA
ccggacgaatgtcaaactca

SEQ ID NO: 23193 - RNA, 20 nt, synthetic construct
  source 1..20: mol_type = other RNA
acttatgaatcaggtcgtaa

SEQ ID NO: 23194 - RNA, 20 nt, synthetic construct
  source 1..20: mol_type = other RNA
gagctcctacgacggcgtag

SEQ ID NO: 23195 - RNA, 20 nt, synthetic construct
  source 1..20: mol_type = other RNA
agctcctacgacggcgtagc

SEQ ID NO: 23196 - RNA, 20 nt, synthetic construct
  source 1..20: mol_type = other RNA
gctcctacgacggcgtagcg

SEQ ID NO: 23197 - RNA, 20 nt, synthetic construct
  source 1..20: mol_type = other RNA
gagtgcttcattgatatgga

SEQ ID NO: 23198 - RNA, 20 nt, synthetic construct
  source 1..20: mol_type = other RNA
agtgcttcattgatatggat

SEQ ID NO: 23199 - RNA, 20 nt, synthetic construct
  source 1..20: mol_type = other RNA
gttcctgttgaacaagtatc

SEQ ID NO: 23200 - RNA, 20 nt, synthetic construct
  source 1..20: mol_type = other RNA
ggttcttctcgatacgctga

SEQ ID NO: 23201 - RNA, 20 nt, synthetic construct
  source 1..20: mol_type = other RNA
gttcttctcgatacgctgaa

SEQ ID NO: 23202 - RNA, 20 nt, synthetic construct
  source 1..20: mol_type = other RNA
cacaaagtggaggagccctt

SEQ ID NO: 23203 - RNA, 20 nt, synthetic construct
  source 1..20: mol_type = other RNA
ttgcgttagcaacgtagctt

SEQ ID NO: 23204 - RNA, 20 nt, synthetic construct
  source 1..20: mol_type = other RNA
agtcagatccctcttggaga

SEQ ID NO: 23205 - RNA, 20 nt, synthetic construct
  source 1..20: mol_type = other RNA
ggacatcatacctctgccat

SEQ ID NO: 23206 - RNA, 20 nt, synthetic construct
  source 1..20: mol_type = other RNA
taggcatgctagttcaaata

SEQ ID NO: 23207 - RNA, 20 nt, synthetic construct
  source 1..20: mol_type = other RNA
ctctcatagacagctcttct

SEQ ID NO: 23208 - RNA, 20 nt, synthetic construct
  source 1..20: mol_type = other RNA
gtattcgcgtcttgaatcaa

SEQ ID NO: 23209 - RNA, 20 nt, synthetic construct
  source 1..20: mol_type = other RNA
ggtcatattgatcaccctgc

SEQ ID NO: 23210 - RNA, 20 nt, synthetic construct
  source 1..20: mol_type = other RNA
cgccattcttaaggcctcgt

SEQ ID NO: 23211 - RNA, 20 nt, synthetic construct
  source 1..20: mol_type = other RNA
gatcccgtcgtatgagtatg

SEQ ID NO: 23212 - RNA, 20 nt, synthetic construct
  source 1..20: mol_type = other RNA
gtcgtctcctatgcgttgaa

SEQ ID NO: 23213 - RNA, 20 nt, synthetic construct
  source 1..20: mol_type = other RNA
tattactgttgcgtcgcctt

SEQ ID NO: 23214 - RNA, 20 nt, synthetic construct
  source 1..20: mol_type = other RNA
attactgttgcgtcgcctta

SEQ ID NO: 23215 - RNA, 20 nt, synthetic construct
  source 1..20: mol_type = other RNA
ttactgttgcgtcgccttag

SEQ ID NO: 23216 - RNA, 20 nt, synthetic construct
  source 1..20: mol_type = other RNA
tcttgatgtggcgttaatca

SEQ ID NO: 23217 - RNA, 20 nt, synthetic construct
  source 1..20: mol_type = other RNA
aataaggctgttcaccgaat

SEQ ID NO: 23218 - RNA, 20 nt, synthetic construct
  source 1..20: mol_type = other RNA
ataaggctgttcaccgaatg

SEQ ID NO: 23219 - RNA, 20 nt, synthetic construct
  source 1..20: mol_type = other RNA
caggagctgtgtcgaaagtt

SEQ ID NO: 23220 - RNA, 20 nt, synthetic construct
  source 1..20: mol_type = other RNA
cgaaagttaggagctaaaga

SEQ ID NO: 23221 - RNA, 20 nt, synthetic construct
  source 1..20: mol_type = other RNA
gttggaagctctaaatgtgc

SEQ ID NO: 23222 - RNA, 20 nt, synthetic construct
  source 1..20: mol_type = other RNA
tgaacatattcgttaaatac

SEQ ID NO: 23223 - RNA, 20 nt, synthetic construct
  source 1..20: mol_type = other RNA
ataactacatgctagcttat

SEQ ID NO: 23224 - RNA, 20 nt, synthetic construct
  source 1..20: mol_type = other RNA
taataagactacactaaacc

SEQ ID NO: 23225 - RNA, 20 nt, synthetic construct
  source 1..20: mol_type = other RNA
aaggatgctgagctacggaa

SEQ ID NO: 23226 - RNA, 20 nt, synthetic construct
  source 1..20: mol_type = other RNA
atggaatgggctgcgaccca

SEQ ID NO: 23227 - RNA, 20 nt, synthetic construct
  source 1..20: mol_type = other RNA
ctgttacacactcggaggta

SEQ ID NO: 23228 - RNA, 20 nt, synthetic construct
  source 1..20: mol_type = other RNA
atattcaaataaacaatccc

SEQ ID NO: 23229 - RNA, 20 nt, synthetic construct
  source 1..20: mol_type = other RNA
tgggaagccgaccatataaa

SEQ ID NO: 23230 - RNA, 20 nt, synthetic construct
  source 1..20: mol_type = other RNA
atccgcacccattcttatca

SEQ ID NO: 23231 - RNA, 20 nt, synthetic construct
  source 1..20: mol_type = other RNA
tgacacggacgttgttatcc

SEQ ID NO: 23232 - RNA, 20 nt, synthetic construct
  source 1..20: mol_type = other RNA
acacggacgttgttatcctg

SEQ ID NO: 23233 - RNA, 20 nt, synthetic construct
  source 1..20: mol_type = other RNA
gagcttcacctgaatatgcg

SEQ ID NO: 23234 - RNA, 20 nt, synthetic construct
  source 1..20: mol_type = other RNA
gcgtctgacgatgtcgtata

SEQ ID NO: 23235 - RNA, 20 nt, synthetic construct
  source 1..20: mol_type = other RNA
ttcaacaaatctgcgtgaac

SEQ ID NO: 23236 - RNA, 20 nt, synthetic construct
  source 1..20: mol_type = other RNA
tagcacagatgatgagatat

SEQ ID NO: 23237 - RNA, 20 nt, synthetic construct
  source 1..20: mol_type = other RNA
cgaatactggtgcgcctaca

SEQ ID NO: 23238 - RNA, 20 nt, synthetic construct
  source 1..20: mol_type = other RNA
aagcatgtctggtgtcccgt

SEQ ID NO: 23239 - RNA, 20 nt, synthetic construct
  source 1..20: mol_type = other RNA
caggtctcaagccagctcgt

SEQ ID NO: 23240 - RNA, 20 nt, synthetic construct
  source 1..20: mol_type = other RNA
cgttggacaacttcatccaa

SEQ ID NO: 23241 - RNA, 20 nt, synthetic construct
  source 1..20: mol_type = other RNA
ctgctggccaatcaggtctt

SEQ ID NO: 23242 - RNA, 20 nt, synthetic construct
  source 1..20: mol_type = other RNA
ttaggactacctactcaggc

SEQ ID NO: 23243 - RNA, 20 nt, synthetic construct
  source 1..20: mol_type = other RNA
aaccagtgcacatatagtga

SEQ ID NO: 23244 - RNA, 20 nt, synthetic construct
  source 1..20: mol_type = other RNA
aaatgggcattaccatgtta

SEQ ID NO: 23245 - RNA, 20 nt, synthetic construct
  source 1..20: mol_type = other RNA
tcacaatcgtccacaccgat

SEQ ID NO: 23246 - RNA, 20 nt, synthetic construct
  source 1..20: mol_type = other RNA
cacaatcgtccacaccgatt

SEQ ID NO: 23247 - RNA, 20 nt, synthetic construct
  source 1..20: mol_type = other RNA
atcgtccacaccgattggga

SEQ ID NO: 23248 - RNA, 20 nt, synthetic construct
  source 1..20: mol_type = other RNA
tacctcggcttgctgctagc

SEQ ID NO: 23249 - RNA, 20 nt, synthetic construct
  source 1..20: mol_type = other RNA
agctggtctaactagtctac

SEQ ID NO: 23250 - RNA, 20 nt, synthetic construct
  source 1..20: mol_type = other RNA
gaccgacaatctcctggaag

SEQ ID NO: 23251 - RNA, 20 nt, synthetic construct
  source 1..20: mol_type = other RNA
acaggagcatagctatccca

SEQ ID NO: 23252 - RNA, 20 nt, synthetic construct
  source 1..20: mol_type = other RNA
cagtgtaaatatattagaga

SEQ ID NO: 23253 - RNA, 20 nt, synthetic construct
  source 1..20: mol_type = other RNA
actgtcaagatggtatctgt

SEQ ID NO: 23254 - RNA, 20 nt, synthetic construct
  source 1..20: mol_type = other RNA
tggcagaaattgttaaccta

SEQ ID NO: 23255 - RNA, 20 nt, synthetic construct
  source 1..20: mol_type = other RNA
taatcgagcaatgttaatct

SEQ ID NO: 23256 - RNA, 20 nt, synthetic construct
  source 1..20: mol_type = other RNA
ttcccaacctgtacagtcat

SEQ ID NO: 23257 - RNA, 20 nt, synthetic construct
  source 1..20: mol_type = other RNA
ctatgggattcacttggaga

SEQ ID NO: 23258 - RNA, 20 nt, synthetic construct
  source 1..20: mol_type = other RNA
attgggagtgaattcacatg

SEQ ID NO: 23259 - RNA, 20 nt, synthetic construct
  source 1..20: mol_type = other RNA
cgcattaatgaaagctgtgc

SEQ ID NO: 23260 - RNA, 20 nt, synthetic construct
  source 1..20: mol_type = other RNA
tagcttagtcactgtcaata

SEQ ID NO: 23261 - RNA, 20 nt, synthetic construct
  source 1..20: mol_type = other RNA
ctgtcaatacggagcatact

SEQ ID NO: 23262 - RNA, 20 nt, synthetic construct
  source 1..20: mol_type = other RNA
acgaaatgctagctaggtta

SEQ ID NO: 23263 - RNA, 20 nt, synthetic construct
  source 1..20: mol_type = other RNA
agctaggttatggtatagta

SEQ ID NO: 23264 - RNA, 20 nt, synthetic construct
  source 1..20: mol_type = other RNA
aaagattggcggctaatatg

SEQ ID NO: 23265 - RNA, 20 nt, synthetic construct
  source 1..20: mol_type = other RNA
aagattggcggctaatatgt

SEQ ID NO: 23266 - RNA, 20 nt, synthetic construct
  source 1..20: mol_type = other RNA
ggctaacatcaatcgggcaa

SEQ ID NO: 23267 - RNA, 20 nt, synthetic construct
  source 1..20: mol_type = other RNA
caatcgggcaatggttactt

SEQ ID NO: 23268 - RNA, 20 nt, synthetic construct
  source 1..20: mol_type = other RNA
acgaaatgctaactaggtat

SEQ ID NO: 23269 - RNA, 20 nt, synthetic construct
  source 1..20: mol_type = other RNA
aactaggtattggtatagta

SEQ ID NO: 23270 - RNA, 20 nt, synthetic construct
  source 1..20: mol_type = other RNA
aagattggcggttaatatgt

SEQ ID NO: 23271 - RNA, 20 nt, synthetic construct
  source 1..20: mol_type = other RNA
agattggcggttaatatgtg

SEQ ID NO: 23272 - RNA, 20 nt, synthetic construct
  source 1..20: mol_type = other RNA
tgttgggagctgacattaat

SEQ ID NO: 23273 - RNA, 20 nt, synthetic construct
  source 1..20: mol_type = other RNA
taatcgggcaatgattacct

SEQ ID NO: 23274 - RNA, 20 nt, synthetic construct
  source 1..20: mol_type = other RNA
tagcgagtcaaacgaataat

SEQ ID NO: 23275-30000 - skipped (6726 entries)

SEQ ID NO: 30001 - RNA, 20 nt, African swine fever virus
  source 1..20: mol_type = genomic RNA
atgtagacacctgtgcaagc

SEQ ID NO: 30002 - RNA, 20 nt, African swine fever virus
  source 1..20: mol_type = genomic RNA
tgttgtttgaaggcgtgtat

SEQ ID NO: 30003 - RNA, 20 nt, African swine fever virus
  source 1..20: mol_type = genomic RNA
gtgcaagcacttgtgcagat

SEQ ID NO: 30004 - RNA, 20 nt, African swine fever virus
  source 1..20: mol_type = genomic RNA
gatcaatcgcaagaatattt

SEQ ID NO: 30005 - RNA, 20 nt, African swine fever virus
  source 1..20: mol_type = genomic RNA
gatatcgtgtatggtggtgg

SEQ ID NO: 30006 - RNA, 20 nt, African swine fever virus
  source 1..20: mol_type = genomic RNA
ccaccatacacgatatcagg

SEQ ID NO: 30007 - RNA, 20 nt, African swine fever virus
  source 1..20: mol_type = genomic RNA
tgttgtttgaaggcagcgcg

SEQ ID NO: 30008 - RNA, 20 nt, African swine fever virus
  source 1..20: mol_type = genomic RNA
caataatgtgttgattcacg

SEQ ID NO: 30009 - RNA, 20 nt, African swine fever virus
  source 1..20: mol_type = genomic RNA
ccatacacgatatcaggtag

SEQ ID NO: 30010 - RNA, 20 nt, African swine fever virus
  source 1..20: mol_type = genomic RNA
aataatgtgttgattcacgc

SEQ ID NO: 30011 - RNA, 20 nt, African swine fever virus
  source 1..20: mol_type = genomic RNA
ataatgtgttgattcacgcc

SEQ ID NO: 30012 - RNA, 20 nt, African swine fever virus
  source 1..20: mol_type = genomic RNA
cttggtagtccaatgatcca

SEQ ID NO: 30013 - RNA, 20 nt, African swine fever virus
  source 1..20: mol_type = genomic RNA
atgatccatgttgcacctaa

SEQ ID NO: 30014 - RNA, 20 nt, African swine fever virus
  source 1..20: mol_type = genomic RNA
ttgtatagatttaggagctg

SEQ ID NO: 30015 - RNA, 20 nt, African swine fever virus
  source 1..20: mol_type = genomic RNA
attacgattcatcatacttg

SEQ ID NO: 30016 - RNA, 20 nt, African swine fever virus
  source 1..20: mol_type = genomic RNA
aattacgattcatcatactt

SEQ ID NO: 30017 - RNA, 20 nt, African swine fever virus
  source 1..20: mol_type = genomic RNA
caattacgattcatcatact

SEQ ID NO: 30018 - RNA, 20 nt, African swine fever virus
  source 1..20: mol_type = genomic RNA
cgaacacaatgctctccact

SEQ ID NO: 30019 - RNA, 20 nt, African swine fever virus
  source 1..20: mol_type = genomic RNA
acctgtacagtcatcggttc

SEQ ID NO: 30020 - RNA, 20 nt, African swine fever virus
  source 1..20: mol_type = genomic RNA
aacctgtacagtcatcggtt

SEQ ID NO: 30021 - RNA, 20 nt, African swine fever virus
  source 1..20: mol_type = genomic RNA
acatattcccaacctgtaca

SEQ ID NO: 30022 - RNA, 20 nt, African swine fever virus
  source 1..20: mol_type = genomic RNA
ggtgatgtggattattatat

SEQ ID NO: 30023 - RNA, 20 nt, African swine fever virus
  source 1..20: mol_type = genomic RNA
tatttaagaaccgggtgatg

SEQ ID NO: 30024 - RNA, 20 nt, African swine fever virus
  source 1..20: mol_type = genomic RNA
taccatatttaagaaccggg

SEQ ID NO: 30025 - RNA, 20 nt, African swine fever virus
  source 1..20: mol_type = genomic RNA
acgctaatcgagcaatgtta

SEQ ID NO: 30026 - RNA, 20 nt, African swine fever virus
  source 1..20: mol_type = genomic RNA
aatattggtatggcatagcg

SEQ ID NO: 30027 - RNA, 20 nt, African swine fever virus
  source 1..20: mol_type = genomic RNA
actgatgctgtatggagagt

SEQ ID NO: 30028 - RNA, 20 nt, African swine fever virus
  source 1..20: mol_type = genomic RNA
aactgatgctgtatggagag

SEQ ID NO: 30029 - RNA, 20 nt, African swine fever virus
  source 1..20: mol_type = genomic RNA
ttgtagattctgttgggact

SEQ ID NO: 30030 - RNA, 20 nt, African swine fever virus
  source 1..20: mol_type = genomic RNA
tggaacactgtatgattcac

SEQ ID NO: 30031 - RNA, 20 nt, African swine fever virus
  source 1..20: mol_type = genomic RNA
cacaatcgtccacaccgatt

SEQ ID NO: 30032 - RNA, 20 nt, African swine fever virus
  source 1..20: mol_type = genomic RNA
gtacctcacaatcgtccaca

SEQ ID NO: 30033 - RNA, 20 nt, African swine fever virus
  source 1..20: mol_type = genomic RNA
ccacaagaagaacttggata

SEQ ID NO: 30034 - RNA, 20 nt, African swine fever virus
  source 1..20: mol_type = genomic RNA
gctggccaatcaggtcttag

SEQ ID NO: 30035 - RNA, 20 nt, African swine fever virus
  source 1..20: mol_type = genomic RNA
gctcgttggacaacttcatc

SEQ ID NO: 30036 - RNA, 20 nt, African swine fever virus
  source 1..20: mol_type = genomic RNA
ggtctcaagccagctcgttg

SEQ ID NO: 30037 - RNA, 20 nt, African swine fever virus
  source 1..20: mol_type = genomic RNA
tggtcttggaatccttacaa

SEQ ID NO: 30038 - RNA, 20 nt, African swine fever virus
  source 1..20: mol_type = genomic RNA
gaggaagaactcgaatactg

SEQ ID NO: 30039 - RNA, 20 nt, African swine fever virus
  source 1..20: mol_type = genomic RNA
ccagaggaagaactcgaata

SEQ ID NO: 30040 - RNA, 20 nt, African swine fever virus
  source 1..20: mol_type = genomic RNA
gccaggtttcaagtcaactc

SEQ ID NO: 30041 - RNA, 20 nt, African swine fever virus
  source 1..20: mol_type = genomic RNA
ctatgatcactatgtataat

SEQ ID NO: 30042 - RNA, 20 nt, African swine fever virus
  source 1..20: mol_type = genomic RNA
atattcatttggaactagtt

SEQ ID NO: 30043 - RNA, 20 nt, African swine fever virus
  source 1..20: mol_type = genomic RNA
gacatcgtataattccagaa

SEQ ID NO: 30044 - RNA, 20 nt, African swine fever virus
  source 1..20: mol_type = genomic RNA
gataagcctgacatcgtata

SEQ ID NO: 30045 - RNA, 20 nt, African swine fever virus
  source 1..20: mol_type = genomic RNA
gtacgttatgtccagataag

SEQ ID NO: 30046 - RNA, 20 nt, African swine fever virus
  source 1..20: mol_type = genomic RNA
tgacacggacgttgttatcc

SEQ ID NO: 30047 - RNA, 20 nt, African swine fever virus
  source 1..20: mol_type = genomic RNA
tttataccatttagggctac

SEQ ID NO: 30048 - RNA, 20 nt, African swine fever virus
  source 1..20: mol_type = genomic RNA
cattcacgacatttaacaag

SEQ ID NO: 30049 - RNA, 20 nt, African swine fever virus
  source 1..20: mol_type = genomic RNA
acattcacgacatttaacaa

SEQ ID NO: 30050 - RNA, 20 nt, African swine fever virus
  source 1..20: mol_type = genomic RNA
attcttatcaaggtatcaac

SEQ ID NO: 30051 - RNA, 20 nt, African swine fever virus
  source 1..20: mol_type = genomic RNA
cacccattcttatcaaggta

SEQ ID NO: 30052 - RNA, 20 nt, African swine fever virus
  source 1..20: mol_type = genomic RNA
aacagacagcaacatggtac

SEQ ID NO: 30053 - RNA, 20 nt, African swine fever virus
  source 1..20: mol_type = genomic RNA
ttagcttatgtcactactgt

SEQ ID NO: 30054 - RNA, 20 nt, African swine fever virus
  source 1..20: mol_type = genomic RNA
gtcgcaagaattataactat

SEQ ID NO: 30055 - RNA, 20 nt, African swine fever virus
  source 1..20: mol_type = genomic RNA
atacagtcctaatcgttgta

SEQ ID NO: 30056 - RNA, 20 nt, African swine fever virus
  source 1..20: mol_type = genomic RNA
tcgtatgagtatgtggtcgt

SEQ ID NO: 30057 - RNA, 20 nt, African swine fever virus
  source 1..20: mol_type = genomic RNA
gtcgtatgagtatgtggtcg

SEQ ID NO: 30058 - RNA, 20 nt, African swine fever virus
  source 1..20: mol_type = genomic RNA
ttcttaaggcctcgttggtg

SEQ ID NO: 30059 - RNA, 20 nt, African swine fever virus
  source 1..20: mol_type = genomic RNA
gccattcttaaggcctcgtt

SEQ ID NO: 30060 - RNA, 20 nt, African swine fever virus
  source 1..20: mol_type = genomic RNA
tccacagtaacaagagcttt

SEQ ID NO: 30061 - RNA, 20 nt, African swine fever virus
  source 1..20: mol_type = genomic RNA
atgacggcgtaatgaagatt

SEQ ID NO: 30062 - RNA, 20 nt, African swine fever virus
  source 1..20: mol_type = genomic RNA
tttaaggacatcatacctct

SEQ ID NO: 30063 - RNA, 20 nt, African swine fever virus
  source 1..20: mol_type = genomic RNA
ttggccgctgtcttctcgag

SEQ ID NO: 30064 - RNA, 20 nt, African swine fever virus
  source 1..20: mol_type = genomic RNA
aggtggactcatactctatc

SEQ ID NO: 30065 - RNA, 20 nt, African swine fever virus
  source 1..20: mol_type = genomic RNA
tgatcgtcctcactttcgtc

SEQ ID NO: 30066 - RNA, 20 nt, African swine fever virus
  source 1..20: mol_type = genomic RNA
tcttaatgactctttccgga

SEQ ID NO: 30067 - RNA, 20 nt, African swine fever virus
  source 1..20: mol_type = genomic RNA
atgttcgtactttatggtgt

SEQ ID NO: 30068 - RNA, 20 nt, African swine fever virus
  source 1..20: mol_type = genomic RNA
tttcgccgtataataagttt

SEQ ID NO: 30069 - RNA, 20 nt, African swine fever virus
  source 1..20: mol_type = genomic RNA
gtttgtaacagtccttacaa

SEQ ID NO: 30070 - RNA, 20 nt, African swine fever virus
  source 1..20: mol_type = genomic RNA
aacagttgcaatacatagtc

SEQ ID NO: 30071 - RNA, 20 nt, African swine fever virus
  source 1..20: mol_type = genomic RNA
tgatcttgccagtgcagtcc

SEQ ID NO: 30072 - RNA, 20 nt, African swine fever virus
  source 1..20: mol_type = genomic RNA
tccgatgctgctactttgag

SEQ ID NO: 30073 - RNA, 20 nt, African swine fever virus
  source 1..20: mol_type = genomic RNA
tgacaacaacagctctacga

SEQ ID NO: 30074 - RNA, 20 nt, African swine fever virus
  source 1..20: mol_type = genomic RNA
atgacaacaacagctctacg

SEQ ID NO: 30075 - RNA, 20 nt, African swine fever virus
  source 1..20: mol_type = genomic RNA
gttcgaacagcatctggttg

SEQ ID NO: 30076 - RNA, 20 nt, African swine fever virus
  source 1..20: mol_type = genomic RNA
agcacttgtaacgtatattc

SEQ ID NO: 30077 - RNA, 20 nt, African swine fever virus
  source 1..20: mol_type = genomic RNA
agtatagccctagcacttgt

SEQ ID NO: 30078 - RNA, 20 nt, African swine fever virus
  source 1..20: mol_type = genomic RNA
tctgaagctgcgattcttaa

SEQ ID NO: 30079 - RNA, 20 nt, African swine fever virus
  source 1..20: mol_type = genomic RNA
ttgccctctgaagctgcgat

SEQ ID NO: 30080 - RNA, 20 nt, African swine fever virus
  source 1..20: mol_type = genomic RNA
accgttgccctctgaagctg

SEQ ID NO: 30081 - RNA, 20 nt, African swine fever virus
  source 1..20: mol_type = genomic RNA
tctagagctcctatgatcac

SEQ ID NO: 30082 - RNA, 20 nt, African swine fever virus
  source 1..20: mol_type = genomic RNA
tacttatgaatcaggtcgta

SEQ ID NO: 30083 - RNA, 20 nt, African swine fever virus
  source 1..20: mol_type = genomic RNA
catatcacaattggataact

SEQ ID NO: 30084 - RNA, 20 nt, African swine fever virus
  source 1..20: mol_type = genomic RNA
gctcatttaacattagggtt

SEQ ID NO: 30085 - RNA, 20 nt, African swine fever virus
  source 1..20: mol_type = genomic RNA
gtacagacctagtcgctgaa

SEQ ID NO: 30086 - RNA, 20 nt, African swine fever virus
  source 1..20: mol_type = genomic RNA
agtacagacctagtcgctga

SEQ ID NO: 30087 - RNA, 20 nt, African swine fever virus
  source 1..20: mol_type = genomic RNA
gttgtataagtacatagtcg

SEQ ID NO: 30088 - RNA, 20 nt, African swine fever virus
  source 1..20: mol_type = genomic RNA
tagtaataggagttgtacca

SEQ ID NO: 30089 - RNA, 20 nt, African swine fever virus
  source 1..20: mol_type = genomic RNA
atagtaataggagttgtacc

SEQ ID NO: 30090 - RNA, 20 nt, African swine fever virus
  source 1..20: mol_type = genomic RNA
cccatagtaataggagttgt

SEQ ID NO: 30091 - RNA, 20 nt, African swine fever virus
  source 1..20: mol_type = genomic RNA
tcccatagtaataggagttg

SEQ ID NO: 30092 - RNA, 20 nt, African swine fever virus
  source 1..20: mol_type = genomic RNA
aagctcctatgatggcataa

SEQ ID NO: 30093 - RNA, 20 nt, African swine fever virus
  source 1..20: mol_type = genomic RNA
tgccggcagcccattcaaga

SEQ ID NO: 30094 - RNA, 20 nt, African swine fever virus
  source 1..20: mol_type = genomic RNA
atgccggcagcccattcaag

SEQ ID NO: 30095 - RNA, 20 nt, African swine fever virus
  source 1..20: mol_type = genomic RNA
cgattctcgcgcagccattt

SEQ ID NO: 30096 - RNA, 20 nt, African swine fever virus
  source 1..20: mol_type = genomic RNA
tcgattctcgcgcagccatt

SEQ ID NO: 30097 - RNA, 20 nt, African swine fever virus
  source 1..20: mol_type = genomic RNA
ccctcgattctcgcgcagcc

SEQ ID NO: 30098 - RNA, 20 nt, African swine fever virus
  source 1..20: mol_type = genomic RNA
tctttatgtcgcatagtata

SEQ ID NO: 30099 - RNA, 20 nt, African swine fever virus
  source 1..20: mol_type = genomic RNA
ttgtagagtatgcttgctaa

SEQ ID NO: 30100 - RNA, 20 nt, African swine fever virus
  source 1..20: mol_type = genomic RNA
gccgttgtagagtatgcttg

SEQ ID NO: 30101 - RNA, 20 nt, African swine fever virus
  source 1..20: mol_type = genomic RNA
agccgttgtagagtatgctt

SEQ ID NO: 30102 - RNA, 20 nt, African swine fever virus
  source 1..20: mol_type = genomic RNA
tagtaacaagagctgtacca

SEQ ID NO: 30103 - RNA, 20 nt, African swine fever virus
  source 1..20: mol_type = genomic RNA
atagtaacaagagctgtacc

SEQ ID NO: 30104 - RNA, 20 nt, African swine fever virus
  source 1..20: mol_type = genomic RNA
cccatagtaacaagagctgt

SEQ ID NO: 30105 - RNA, 20 nt, African swine fever virus
  source 1..20: mol_type = genomic RNA
gtcctgaatttggctatggt

SEQ ID NO: 30106 - RNA, 20 nt, African swine fever virus
  source 1..20: mol_type = genomic RNA
atatgacgatttagcagaag

SEQ ID NO: 30107 - RNA, 20 nt, African swine fever virus
  source 1..20: mol_type = genomic RNA
taccaatatgacgatttagc

SEQ ID NO: 30108 - RNA, 20 nt, African swine fever virus
  source 1..20: mol_type = genomic RNA
catgcttgcctaagggctca

SEQ ID NO: 30109 - RNA, 20 nt, African swine fever virus
  source 1..20: mol_type = genomic RNA
gccgttgaaccacatgcttg

SEQ ID NO: 30110 - RNA, 20 nt, African swine fever virus
  source 1..20: mol_type = genomic RNA
agccgttgaaccacatgctt

SEQ ID NO: 30111 - RNA, 20 nt, African swine fever virus
  source 1..20: mol_type = genomic RNA
agtataatcccagccgttga

SEQ ID NO: 30112 - RNA, 20 nt, African swine fever virus
  source 1..20: mol_type = genomic RNA
tcccagtataatcccagccg

SEQ ID NO: 30113 - RNA, 20 nt, African swine fever virus
  source 1..20: mol_type = genomic RNA
ctcgtttaagtgaaccatgg

SEQ ID NO: 30114 - RNA, 20 nt, African swine fever virus
  source 1..20: mol_type = genomic RNA
actcgtttaagtgaaccatg

SEQ ID NO: 30115 - RNA, 20 nt, African swine fever virus
  source 1..20: mol_type = genomic RNA
tccgaggctgcaatttgtat

SEQ ID NO: 30116 - RNA, 20 nt, African swine fever virus
  source 1..20: mol_type = genomic RNA
atgatggcatattgtagact

SEQ ID NO: 30117 - RNA, 20 nt, African swine fever virus
  source 1..20: mol_type = genomic RNA
gccctctaaggctcctatga

SEQ ID NO: 30118 - RNA, 20 nt, African swine fever virus
  source 1..20: mol_type = genomic RNA
agaagaagcatgtagcctaa

SEQ ID NO: 30119 - RNA, 20 nt, African swine fever virus
  source 1..20: mol_type = genomic RNA
cgattctacagcatggagta

SEQ ID NO: 30120 - RNA, 20 nt, African swine fever virus
  source 1..20: mol_type = genomic RNA
gcgattctacagcatggagt

SEQ ID NO: 30121 - RNA, 20 nt, African swine fever virus
  source 1..20: mol_type = genomic RNA
ggaggcccgcgattctacag

SEQ ID NO: 30122 - RNA, 20 nt, African swine fever virus
  source 1..20: mol_type = genomic RNA
agttgttgaagtacatgctt

SEQ ID NO: 30123 - RNA, 20 nt, African swine fever virus
  source 1..20: mol_type = genomic RNA
gtacagccctagttgttgaa

SEQ ID NO: 30124 - RNA, 20 nt, African swine fever virus
  source 1..20: mol_type = genomic RNA
tccagtacagccctagttgt

SEQ ID NO: 30125 - RNA, 20 nt, African swine fever virus
  source 1..20: mol_type = genomic RNA
ttccagtacagccctagttg

SEQ ID NO: 30126 - RNA, 20 nt, African swine fever virus
  source 1..20: mol_type = genomic RNA
attcgttgaagagatccatg

SEQ ID NO: 30127 - RNA, 20 nt, African swine fever virus
  source 1..20: mol_type = genomic RNA
tcttctgccgccattcttaa

SEQ ID NO: 30128 - RNA, 20 nt, African swine fever virus
  source 1..20: mol_type = genomic RNA
acagtaacaagagctttact

SEQ ID NO: 30129 - RNA, 20 nt, African swine fever virus
  source 1..20: mol_type = genomic RNA
atccatctaatgatgtcatt

SEQ ID NO: 30130 - RNA, 20 nt, African swine fever virus
  source 1..20: mol_type = genomic RNA
cagttcgaaggtgatatgat

SEQ ID NO: 30131 - RNA, 20 nt, African swine fever virus
  source 1..20: mol_type = genomic RNA
ccgcagttcgaaggtgatat

SEQ ID NO: 30132 - RNA, 20 nt, African swine fever virus
  source 1..20: mol_type = genomic RNA
gccgccgcagttcgaaggtg

SEQ ID NO: 30133 - RNA, 20 nt, African swine fever virus
  source 1..20: mol_type = genomic RNA
cctgccgccgcagttcgaag

SEQ ID NO: 30134 - RNA, 20 nt, African swine fever virus
  source 1..20: mol_type = genomic RNA
gatagccgcggatagaacgg

SEQ ID NO: 30135 - RNA, 20 nt, African swine fever virus
  source 1..20: mol_type = genomic RNA
atgcttgtacctgatagccg

SEQ ID NO: 30136 - RNA, 20 nt, African swine fever virus
  source 1..20: mol_type = genomic RNA
gcacagcatagagtagcagt

SEQ ID NO: 30137 - RNA, 20 nt, African swine fever virus
  source 1..20: mol_type = genomic RNA
ggattcccgtgcagccattt

SEQ ID NO: 30138 - RNA, 20 nt, African swine fever virus
  source 1..20: mol_type = genomic RNA
agcagctttggagatcattt

SEQ ID NO: 30139 - RNA, 20 nt, African swine fever virus
  source 1..20: mol_type = genomic RNA
caagcagctttggagatcat

SEQ ID NO: 30140 - RNA, 20 nt, African swine fever virus
  source 1..20: mol_type = genomic RNA
gattgaggcttcatggtatt

SEQ ID NO: 30141 - RNA, 20 nt, African swine fever virus
  source 1..20: mol_type = genomic RNA
ccgctaccagcatattagag

SEQ ID NO: 30142 - RNA, 20 nt, African swine fever virus
  source 1..20: mol_type = genomic RNA
cctccgctaccagcatatta

SEQ ID NO: 30143 - RNA, 20 nt, African swine fever virus
  source 1..20: mol_type = genomic RNA
gtttaccgcgttatgattcg

SEQ ID NO: 30144 - RNA, 20 nt, African swine fever virus
  source 1..20: mol_type = genomic RNA
ggatctgaatttattcgatt

SEQ ID NO: 30145 - RNA, 20 nt, African swine fever virus
  source 1..20: mol_type = genomic RNA
gtggccttatattgcaggtg

SEQ ID NO: 30146 - RNA, 20 nt, African swine fever virus
  source 1..20: mol_type = genomic RNA
ccggtggccttatattgcag

SEQ ID NO: 30147 - RNA, 20 nt, African swine fever virus
  source 1..20: mol_type = genomic RNA
aatccagacacgaccaccgg

SEQ ID NO: 30148 - RNA, 20 nt, African swine fever virus
  source 1..20: mol_type = genomic RNA
tcgagggaatcaatggtgtg

SEQ ID NO: 30149 - RNA, 20 nt, African swine fever virus
  source 1..20: mol_type = genomic RNA
tttattaatcatgcgtggaa

SEQ ID NO: 30150 - RNA, 20 nt, African swine fever virus
  source 1..20: mol_type = genomic RNA
ctaacatcatcgccagagga

SEQ ID NO: 30151 - RNA, 20 nt, African swine fever virus
  source 1..20: mol_type = genomic RNA
ttcgtgcagtcgtttcatga

SEQ ID NO: 30152 - RNA, 20 nt, African swine fever virus
  source 1..20: mol_type = genomic RNA
attcgtgcagtcgtttcatg

SEQ ID NO: 30153 - RNA, 20 nt, African swine fever virus
  source 1..20: mol_type = genomic RNA
cttccaccattgcagcattc

SEQ ID NO: 30154 - RNA, 20 nt, African swine fever virus
  source 1..20: mol_type = genomic RNA
cattcaatgcgtccatgaca

SEQ ID NO: 30155 - RNA, 20 nt, African swine fever virus
  source 1..20: mol_type = genomic RNA
gtgatgaaggccgcaatacg

SEQ ID NO: 30156 - RNA, 20 nt, African swine fever virus
  source 1..20: mol_type = genomic RNA
cggtattcatgtggatatgc

SEQ ID NO: 30157 - RNA, 20 nt, African swine fever virus
  source 1..20: mol_type = genomic RNA
tggattgtcaatagatgcga

SEQ ID NO: 30158 - RNA, 20 nt, African swine fever virus
  source 1..20: mol_type = genomic RNA
agaattaccgcacatatggg

SEQ ID NO: 30159 - RNA, 20 nt, African swine fever virus
  source 1..20: mol_type = genomic RNA
acctgtattcaagaagccta

SEQ ID NO: 30160 - RNA, 20 nt, African swine fever virus
  source 1..20: mol_type = genomic RNA
gcaggccgaagatcttgacc

SEQ ID NO: 30161 - RNA, 20 nt, African swine fever virus
  source 1..20: mol_type = genomic RNA
ctgtttcgcaacgcgatggc

SEQ ID NO: 30162 - RNA, 20 nt, African swine fever virus
  source 1..20: mol_type = genomic RNA
aaccactgtttcgcaacgcg

SEQ ID NO: 30163 - RNA, 20 nt, African swine fever virus
  source 1..20: mol_type = genomic RNA
tggtgttggcgggccttatc

SEQ ID NO: 30164 - RNA, 20 nt, African swine fever virus
  source 1..20: mol_type = genomic RNA
tgcaagattggacaacccgt

SEQ ID NO: 30165 - RNA, 20 nt, African swine fever virus
  source 1..20: mol_type = genomic RNA
ggtgtcggacctggagtcct

SEQ ID NO: 30166 - RNA, 20 nt, African swine fever virus
  source 1..20: mol_type = genomic RNA
taccaggtgtcggacctgga

SEQ ID NO: 30167 - RNA, 20 nt, African swine fever virus
  source 1..20: mol_type = genomic RNA
gcagcgagagacttccttgg

SEQ ID NO: 30168 - RNA, 20 nt, African swine fever virus
  source 1..20: mol_type = genomic RNA
tacccgcagcgagagacttc

SEQ ID NO: 30169 - RNA, 20 nt, African swine fever virus
  source 1..20: mol_type = genomic RNA
ccttacccgcagcgagagac

SEQ ID NO: 30170 - RNA, 20 nt, African swine fever virus
  source 1..20: mol_type = genomic RNA
tacgctatggtacgcagggc

SEQ ID NO: 30171 - RNA, 20 nt, African swine fever virus
  source 1..20: mol_type = genomic RNA
cggatcggtgtcagaattgt

SEQ ID NO: 30172 - RNA, 20 nt, African swine fever virus
  source 1..20: mol_type = genomic RNA
acggatcggtgtcagaattg

SEQ ID NO: 30173 - RNA, 20 nt, African swine fever virus
  source 1..20: mol_type = genomic RNA
tcagaggttgcctatccgat

SEQ ID NO: 30174 - RNA, 20 nt, African swine fever virus
  source 1..20: mol_type = genomic RNA
tttgcagacgccttggcgtc

SEQ ID NO: 30175 - RNA, 20 nt, African swine fever virus
  source 1..20: mol_type = genomic RNA
gccgcgacaggttatcctca

SEQ ID NO: 30176 - RNA, 20 nt, African swine fever virus
  source 1..20: mol_type = genomic RNA
tgccgcgacaggttatcctc

SEQ ID NO: 30177 - RNA, 20 nt, African swine fever virus
  source 1..20: mol_type = genomic RNA
gatagctcactcaaccctgc

SEQ ID NO: 30178 - RNA, 20 nt, African swine fever virus
  source 1..20: mol_type = genomic RNA
tgatagctcactcaaccctg

SEQ ID NO: 30179 - RNA, 20 nt, African swine fever virus
  source 1..20: mol_type = genomic RNA
gggagctatacgcggagttg

SEQ ID NO: 30180 - RNA, 20 nt, African swine fever virus
  source 1..20: mol_type = genomic RNA
ttcgctactatctgcgagaa

SEQ ID NO: 30181 - RNA, 20 nt, African swine fever virus
  source 1..20: mol_type = genomic RNA
ttacccatgtgttgctcaac

SEQ ID NO: 30182 - RNA, 20 nt, African swine fever virus
  source 1..20: mol_type = genomic RNA
cgctactggtggatgatttc

SEQ ID NO: 30183 - RNA, 20 nt, African swine fever virus
  source 1..20: mol_type = genomic RNA
accaatcctccacgctactg

SEQ ID NO: 30184 - RNA, 20 nt, African swine fever virus
  source 1..20: mol_type = genomic RNA
cctaccaatcctccacgcta

SEQ ID NO: 30185 - RNA, 20 nt, African swine fever virus
  source 1..20: mol_type = genomic RNA
tctcttcttgtgattgccac

SEQ ID NO: 30186 - RNA, 20 nt, African swine fever virus
  source 1..20: mol_type = genomic RNA
tactacggcagactctggaa

SEQ ID NO: 30187 - RNA, 20 nt, African swine fever virus
  source 1..20: mol_type = genomic RNA
gtccctactacggcagactc

SEQ ID NO: 30188 - RNA, 20 nt, African swine fever virus
  source 1..20: mol_type = genomic RNA
ggcctgtccctactacggca

SEQ ID NO: 30189 - RNA, 20 nt, African swine fever virus
  source 1..20: mol_type = genomic RNA
ggtgccgggcctgtccctac

SEQ ID NO: 30190 - RNA, 20 nt, African swine fever virus
  source 1..20: mol_type = genomic RNA
ttctgcagatggcctgccgc

SEQ ID NO: 30191 - RNA, 20 nt, African swine fever virus
  source 1..20: mol_type = genomic RNA
ggtgataactcctgtggaag

SEQ ID NO: 30192 - RNA, 20 nt, African swine fever virus
  source 1..20: mol_type = genomic RNA
tctgatccgctgataagcaa

SEQ ID NO: 30193 - RNA, 20 nt, African swine fever virus
  source 1..20: mol_type = genomic RNA
cttatgagatgaatgattcc

SEQ ID NO: 30194 - RNA, 20 nt, African swine fever virus
  source 1..20: mol_type = genomic RNA
acttatgagatgaatgattc

SEQ ID NO: 30195 - RNA, 20 nt, African swine fever virus
  source 1..20: mol_type = genomic RNA
tgatggatcttatacaacct

SEQ ID NO: 30196 - RNA, 20 nt, African swine fever virus
  source 1..20: mol_type = genomic RNA
ctaggctccatgatggatct

SEQ ID NO: 30197 - RNA, 20 nt, African swine fever virus
  source 1..20: mol_type = genomic RNA
acggcggtcaagaggagttt

SEQ ID NO: 30198 - RNA, 20 nt, African swine fever virus
  source 1..20: mol_type = genomic RNA
ggatgatttcccacggcggt

SEQ ID NO: 30199 - RNA, 20 nt, African swine fever virus
  source 1..20: mol_type = genomic RNA
tggatgatttcccacggcgg

SEQ ID NO: 30200 - RNA, 20 nt, African swine fever virus
  source 1..20: mol_type = genomic RNA
actaccctggatgatttccc

SEQ ID NO: 30201 - RNA, 20 nt, African swine fever virus
  source 1..20: mol_type = genomic RNA
cggtgatcactacggcatac

SEQ ID NO: 30202 - RNA, 20 nt, African swine fever virus
  source 1..20: mol_type = genomic RNA
ataaccatctggagtccacg

SEQ ID NO: 30203 - RNA, 20 nt, African swine fever virus
  source 1..20: mol_type = genomic RNA
ggtcgagtttggtaagaact

SEQ ID NO: 30204 - RNA, 20 nt, African swine fever virus
  source 1..20: mol_type = genomic RNA
cctggtcgagtttggtaaga

SEQ ID NO: 30205 - RNA, 20 nt, African swine fever virus
  source 1..20: mol_type = genomic RNA
atgagaatccgcgctggctc

SEQ ID NO: 30206 - RNA, 20 nt, African swine fever virus
  source 1..20: mol_type = genomic RNA
ccgggcatctaatcatttct

SEQ ID NO: 30207 - RNA, 20 nt, African swine fever virus
  source 1..20: mol_type = genomic RNA
tatgtgacatttctacaacg

SEQ ID NO: 30208 - RNA, 20 nt, African swine fever virus
  source 1..20: mol_type = genomic RNA
gctgatatttatagcagggt

SEQ ID NO: 30209 - RNA, 20 nt, African swine fever virus
  source 1..20: mol_type = genomic RNA
tgaatggtgcggccgcatta

SEQ ID NO: 30210 - RNA, 20 nt, African swine fever virus
  source 1..20: mol_type = genomic RNA
gggaacagctcagcaagtct

SEQ ID NO: 30211 - RNA, 20 nt, African swine fever virus
  source 1..20: mol_type = genomic RNA
acgcagtatcagaactgtgt

SEQ ID NO: 30212 - RNA, 20 nt, African swine fever virus
  source 1..20: mol_type = genomic RNA
acaggaacactctgggtgag

SEQ ID NO: 30213 - RNA, 20 nt, African swine fever virus
  source 1..20: mol_type = genomic RNA
tctttgttgttgccgacgaa

SEQ ID NO: 30214 - RNA, 20 nt, African swine fever virus
  source 1..20: mol_type = genomic RNA
cgaatgttggaactggtata

SEQ ID NO: 30215 - RNA, 20 nt, African swine fever virus
  source 1..20: mol_type = genomic RNA
gcgcctgcgatagtctatct

SEQ ID NO: 30216 - RNA, 20 nt, African swine fever virus
  source 1..20: mol_type = genomic RNA
caagggttgaatagtcataa

SEQ ID NO: 30217 - RNA, 20 nt, African swine fever virus
  source 1..20: mol_type = genomic RNA
ttgactggtgcagctggtac

SEQ ID NO: 30218 - RNA, 20 nt, African swine fever virus
  source 1..20: mol_type = genomic RNA
ttgagaaggaggaggccgtt

SEQ ID NO: 30219 - RNA, 20 nt, African swine fever virus
  source 1..20: mol_type = genomic RNA
caggagggacagcttgtaat

SEQ ID NO: 30220 - RNA, 20 nt, African swine fever virus
  source 1..20: mol_type = genomic RNA
gcgggcgttccatgatgacc

SEQ ID NO: 30221 - RNA, 20 nt, African swine fever virus
  source 1..20: mol_type = genomic RNA
tagatcataatggcgacgcg

SEQ ID NO: 30222 - RNA, 20 nt, African swine fever virus
  source 1..20: mol_type = genomic RNA
attccatagatcataatggc

SEQ ID NO: 30223 - RNA, 20 nt, African swine fever virus
  source 1..20: mol_type = genomic RNA
gcattgaacatggtgggcga

SEQ ID NO: 30224 - RNA, 20 nt, African swine fever virus
  source 1..20: mol_type = genomic RNA
attccaccgccgccgcctga

SEQ ID NO: 30225 - RNA, 20 nt, African swine fever virus
  source 1..20: mol_type = genomic RNA
tggttcgcgtagcattgtga

SEQ ID NO: 30226 - RNA, 20 nt, African swine fever virus
  source 1..20: mol_type = genomic RNA
ccctggttcgcgtagcattg

SEQ ID NO: 30227 - RNA, 20 nt, African swine fever virus
  source 1..20: mol_type = genomic RNA
gggcgtaggcctccctggtt

SEQ ID NO: 30228 - RNA, 20 nt, African swine fever virus
  source 1..20: mol_type = genomic RNA
agggcgtaggcctccctggt

SEQ ID NO: 30229 - RNA, 20 nt, African swine fever virus
  source 1..20: mol_type = genomic RNA
tagaccgtacttgagattgg

SEQ ID NO: 30230 - RNA, 20 nt, African swine fever virus
  source 1..20: mol_type = genomic RNA
atagaccgtacttgagattg

SEQ ID NO: 30231 - RNA, 20 nt, African swine fever virus
  source 1..20: mol_type = genomic RNA
ctgttatgtatttggtcttc

SEQ ID NO: 30232 - RNA, 20 nt, African swine fever virus
  source 1..20: mol_type = genomic RNA
tcgcctctgttatgtatttg

SEQ ID NO: 30233 - RNA, 20 nt, African swine fever virus
  source 1..20: mol_type = genomic RNA
ggtgccgtcgcctctgttat

SEQ ID NO: 30234 - RNA, 20 nt, African swine fever virus
  source 1..20: mol_type = genomic RNA
tcgtaacaccggtgtacctt

SEQ ID NO: 30235 - RNA, 20 nt, African swine fever virus
  source 1..20: mol_type = genomic RNA
tggccgtcgtaacaccggtg

SEQ ID NO: 30236 - RNA, 20 nt, African swine fever virus
  source 1..20: mol_type = genomic RNA
ataggtcggtgacgcatatt

SEQ ID NO: 30237 - RNA, 20 nt, African swine fever virus
  source 1..20: mol_type = genomic RNA
atgccaataggtcggtgacg

SEQ ID NO: 30238 - RNA, 20 nt, African swine fever virus
  source 1..20: mol_type = genomic RNA
gatgccaataggtcggtgac

SEQ ID NO: 30239 - RNA, 20 nt, African swine fever virus
  source 1..20: mol_type = genomic RNA
cgatgccaataggtcggtga

SEQ ID NO: 30240 - RNA, 20 nt, African swine fever virus
  source 1..20: mol_type = genomic RNA
tagtatagggccgcatggat

SEQ ID NO: 30241 - RNA, 20 nt, African swine fever virus
  source 1..20: mol_type = genomic RNA
gtagtatagggccgcatgga

SEQ ID NO: 30242 - RNA, 20 nt, African swine fever virus
  source 1..20: mol_type = genomic RNA
cgtagtatagggccgcatgg

SEQ ID NO: 30243 - RNA, 20 nt, African swine fever virus
  source 1..20: mol_type = genomic RNA
taggtcgggttgcagtagac

SEQ ID NO: 30244 - RNA, 20 nt, African swine fever virus
  source 1..20: mol_type = genomic RNA
ataggtcgggttgcagtaga

SEQ ID NO: 30245 - RNA, 20 nt, African swine fever virus
  source 1..20: mol_type = genomic RNA
cagcgaacccataggtcggg

SEQ ID NO: 30246 - RNA, 20 nt, African swine fever virus
  source 1..20: mol_type = genomic RNA
gcgtcgtctgtgccacgcgt

SEQ ID NO: 30247 - RNA, 20 nt, African swine fever virus
  source 1..20: mol_type = genomic RNA
cgttaacacaccctgcgtcg

SEQ ID NO: 30248 - RNA, 20 nt, African swine fever virus
  source 1..20: mol_type = genomic RNA
gccgtagttgccaccagctt

SEQ ID NO: 30249 - RNA, 20 nt, African swine fever virus
  source 1..20: mol_type = genomic RNA
tgcatggccgccagccgtag

SEQ ID NO: 30250 - RNA, 20 nt, African swine fever virus
  source 1..20: mol_type = genomic RNA
tttcgaactccctgcatggc

SEQ ID NO: 30251 - RNA, 20 nt, African swine fever virus
  source 1..20: mol_type = genomic RNA
tgagatatccatttcgaact

SEQ ID NO: 30252 - RNA, 20 nt, African swine fever virus
  source 1..20: mol_type = genomic RNA
cttaacgttctacgtgtata

SEQ ID NO: 30253 - RNA, 20 nt, African swine fever virus
  source 1..20: mol_type = genomic RNA
gcttaacgttctacgtgtat

SEQ ID NO: 30254 - RNA, 20 nt, African swine fever virus
  source 1..20: mol_type = genomic RNA
cgcttaacgttctacgtgta

SEQ ID NO: 30255 - RNA, 20 nt, African swine fever virus
  source 1..20: mol_type = genomic RNA
atcacggatctcggccggta

SEQ ID NO: 30256 - RNA, 20 nt, African swine fever virus
  source 1..20: mol_type = genomic RNA
ggcttagttcaggttcataa

SEQ ID NO: 30257 - RNA, 20 nt, African swine fever virus
  source 1..20: mol_type = genomic RNA
aggacgagcaccgtaagtac

SEQ ID NO: 30258 - RNA, 20 nt, African swine fever virus
  source 1..20: mol_type = genomic RNA
gcctaggacgagcaccgtaa

SEQ ID NO: 30259 - RNA, 20 nt, African swine fever virus
  source 1..20: mol_type = genomic RNA
cattacacgctttctcagag

SEQ ID NO: 30260 - RNA, 20 nt, African swine fever virus
  source 1..20: mol_type = genomic RNA
cgcagtccgcattacacgct

SEQ ID NO: 30261 - RNA, 20 nt, African swine fever virus
  source 1..20: mol_type = genomic RNA
taacaagggtaattactaca

SEQ ID NO: 30262 - RNA, 20 nt, African swine fever virus
  source 1..20: mol_type = genomic RNA
taatatattgaccaatgaac

SEQ ID NO: 30263 - RNA, 20 nt, African swine fever virus
  source 1..20: mol_type = genomic RNA
tatgtacgccattatgctgt

SEQ ID NO: 30264 - RNA, 20 nt, African swine fever virus
  source 1..20: mol_type = genomic RNA
tgcaacatgcagagcatcat

SEQ ID NO: 30265 - RNA, 20 nt, African swine fever virus
  source 1..20: mol_type = genomic RNA
gcaagacctatttgcgtatg

SEQ ID NO: 30266 - RNA, 20 nt, African swine fever virus
  source 1..20: mol_type = genomic RNA
gcgctaaggtgtttatactg

SEQ ID NO: 30267 - RNA, 20 nt, African swine fever virus
  source 1..20: mol_type = genomic RNA
acaccggcgctaaggtgttt

SEQ ID NO: 30268 - RNA, 20 nt, African swine fever virus
  source 1..20: mol_type = genomic RNA
ggtcgccgacaccggcgcta

SEQ ID NO: 30269 - RNA, 20 nt, African swine fever virus
  source 1..20: mol_type = genomic RNA
tactaccatctatggctcga

SEQ ID NO: 30270 - RNA, 20 nt, African swine fever virus
  source 1..20: mol_type = genomic RNA
aatgttgggccgcgtgcgtg

SEQ ID NO: 30271 - RNA, 20 nt, African swine fever virus
  source 1..20: mol_type = genomic RNA
cgatttcggcgggtgtttcg

SEQ ID NO: 30272 - RNA, 20 nt, African swine fever virus
  source 1..20: mol_type = genomic RNA
acgatttcggcgggtgtttc

SEQ ID NO: 30273 - RNA, 20 nt, African swine fever virus
  source 1..20: mol_type = genomic RNA
tatctatacgcccacgattt

SEQ ID NO: 30274 - RNA, 20 nt, African swine fever virus
  source 1..20: mol_type = genomic RNA
ggctgttgcaatcatttatc

SEQ ID NO: 30275 - RNA, 20 nt, African swine fever virus
  source 1..20: mol_type = genomic RNA
gcatgacacgtattatttca

SEQ ID NO: 30276 - RNA, 20 nt, African swine fever virus
  source 1..20: mol_type = genomic RNA
agcctgtggacctacttatt

SEQ ID NO: 30277 - RNA, 20 nt, African swine fever virus
  source 1..20: mol_type = genomic RNA
ccacagccgagcctgtggac

SEQ ID NO: 30278 - RNA, 20 nt, African swine fever virus
  source 1..20: mol_type = genomic RNA
gctaacctccacagccgagc

SEQ ID NO: 30279 - RNA, 20 nt, African swine fever virus
  source 1..20: mol_type = genomic RNA
tacggtttgtgacatttcga

SEQ ID NO: 30280 - RNA, 20 nt, African swine fever virus
  source 1..20: mol_type = genomic RNA
agttcctgcgatactatcca

SEQ ID NO: 30281 - RNA, 20 nt, African swine fever virus
  source 1..20: mol_type = genomic RNA
tataacatcaatctaacgcg

SEQ ID NO: 30282 - RNA, 20 nt, African swine fever virus
  source 1..20: mol_type = genomic RNA
aggagaagccgtagaggata

SEQ ID NO: 30283 - RNA, 20 nt, African swine fever virus
  source 1..20: mol_type = genomic RNA
tggtatcgtaacgttctata

SEQ ID NO: 30284 - RNA, 20 nt, African swine fever virus
  source 1..20: mol_type = genomic RNA
tcatgacggtcataaggttg

SEQ ID NO: 30285 - RNA, 20 nt, African swine fever virus
  source 1..20: mol_type = genomic RNA
gaagtggagtgccatttatc

SEQ ID NO: 30286 - RNA, 20 nt, African swine fever virus
  source 1..20: mol_type = genomic RNA
gaggcgggaggactcgtttg

SEQ ID NO: 30287 - RNA, 20 nt, African swine fever virus
  source 1..20: mol_type = genomic RNA
ttcgctacgcgtgaagaaca

SEQ ID NO: 30288 - RNA, 20 nt, African swine fever virus
  source 1..20: mol_type = genomic RNA
attcgctacgcgtgaagaac

SEQ ID NO: 30289 - RNA, 20 nt, African swine fever virus
  source 1..20: mol_type = genomic RNA
atatggcctgaatttctggt

SEQ ID NO: 30290 - RNA, 20 nt, African swine fever virus
  source 1..20: mol_type = genomic RNA
cggcatgcaatctttcgatc

SEQ ID NO: 30291 - RNA, 20 nt, African swine fever virus
  source 1..20: mol_type = genomic RNA
tcggcatgcaatctttcgat

SEQ ID NO: 30292 - RNA, 20 nt, African swine fever virus
  source 1..20: mol_type = genomic RNA
ctggaggaaccagatttgga

SEQ ID NO: 30293 - RNA, 20 nt, African swine fever virus
  source 1..20: mol_type = genomic RNA
gcacaaggctaattgttcca

SEQ ID NO: 30294 - RNA, 20 nt, African swine fever virus
  source 1..20: mol_type = genomic RNA
agcacaaggctaattgttcc

SEQ ID NO: 30295 - RNA, 20 nt, African swine fever virus
  source 1..20: mol_type = genomic RNA
acgtcagataactgtgtgct

SEQ ID NO: 30296 - RNA, 20 nt, African swine fever virus
  source 1..20: mol_type = genomic RNA
gcaaggataagcgtcttgtc

SEQ ID NO: 30297 - RNA, 20 nt, African swine fever virus
  source 1..20: mol_type = genomic RNA
cccgcaaggataagcgtctt

SEQ ID NO: 30298 - RNA, 20 nt, African swine fever virus
  source 1..20: mol_type = genomic RNA
aggcctggtttagcagagta

SEQ ID NO: 30299 - RNA, 20 nt, African swine fever virus
  source 1..20: mol_type = genomic RNA
atgggatctagcttatacat

SEQ ID NO: 30300 - RNA, 20 nt, African swine fever virus
  source 1..20: mol_type = genomic RNA
aatgggatctagcttataca

SEQ ID NO: 30301 - RNA, 20 nt, African swine fever virus
  source 1..20: mol_type = genomic RNA
ccttcttcaacaatctttgc

SEQ ID NO: 30302 - RNA, 20 nt, African swine fever virus
  source 1..20: mol_type = genomic RNA
ctgaggcttcagctattccg

SEQ ID NO: 30303 - RNA, 20 nt, African swine fever virus
  source 1..20: mol_type = genomic RNA
atggttgggaatcttggtga

SEQ ID NO: 30304 - RNA, 20 nt, African swine fever virus
  source 1..20: mol_type = genomic RNA
ctatttccaatcttcgcgga

SEQ ID NO: 30305 - RNA, 20 nt, African swine fever virus
  source 1..20: mol_type = genomic RNA
gctatttccaatcttcgcgg

SEQ ID NO: 30306 - RNA, 20 nt, African swine fever virus
  source 1..20: mol_type = genomic RNA
cccgctatttccaatcttcg

SEQ ID NO: 30307 - RNA, 20 nt, African swine fever virus
  source 1..20: mol_type = genomic RNA
gcccgctatttccaatcttc

SEQ ID NO: 30308 - RNA, 20 nt, African swine fever virus
  source 1..20: mol_type = genomic RNA
tcttcccgcccgctatttcc

SEQ ID NO: 30309 - RNA, 20 nt, African swine fever virus
  source 1..20: mol_type = genomic RNA
ccttcttcccgcccgctatt

SEQ ID NO: 30310 - RNA, 20 nt, African swine fever virus
  source 1..20: mol_type = genomic RNA
acaacgattcgctgacgggt

SEQ ID NO: 30311 - RNA, 20 nt, African swine fever virus
  source 1..20: mol_type = genomic RNA
ccaacaacgattcgctgacg

SEQ ID NO: 30312 - RNA, 20 nt, African swine fever virus
  source 1..20: mol_type = genomic RNA
gatttgtaggcaagagcgga

SEQ ID NO: 30313 - RNA, 20 nt, African swine fever virus
  source 1..20: mol_type = genomic RNA
taattccggatttgtaggca

SEQ ID NO: 30314 - RNA, 20 nt, African swine fever virus
  source 1..20: mol_type = genomic RNA
gtgttgtacatatctactat

SEQ ID NO: 30315 - RNA, 20 nt, African swine fever virus
  source 1..20: mol_type = genomic RNA
ctttatgagcgcgttagggt

SEQ ID NO: 30316 - RNA, 20 nt, African swine fever virus
  source 1..20: mol_type = genomic RNA
actttatgagcgcgttaggg

SEQ ID NO: 30317 - RNA, 20 nt, African swine fever virus
  source 1..20: mol_type = genomic RNA
atgttaatattacatccgtg

SEQ ID NO: 30318 - RNA, 20 nt, African swine fever virus
  source 1..20: mol_type = genomic RNA
ccatcgtatttcaacacgaa

SEQ ID NO: 30319 - RNA, 20 nt, African swine fever virus
  source 1..20: mol_type = genomic RNA
atatcggcatggtagatagc

SEQ ID NO: 30320 - RNA, 20 nt, African swine fever virus
  source 1..20: mol_type = genomic RNA
ggccgatatcggcatggtag

SEQ ID NO: 30321 - RNA, 20 nt, African swine fever virus
  source 1..20: mol_type = genomic RNA
tctataacgcgagtcatccc

SEQ ID NO: 30322 - RNA, 20 nt, African swine fever virus
  source 1..20: mol_type = genomic RNA
gccatctataacgcgagtca

SEQ ID NO: 30323 - RNA, 20 nt, African swine fever virus
  source 1..20: mol_type = genomic RNA
cacaggccagccgttggacg

SEQ ID NO: 30324 - RNA, 20 nt, African swine fever virus
  source 1..20: mol_type = genomic RNA
tcacaggccagccgttggac

SEQ ID NO: 30325 - RNA, 20 nt, African swine fever virus
  source 1..20: mol_type = genomic RNA
cggatgccctcacaggccag

SEQ ID NO: 30326 - RNA, 20 nt, African swine fever virus
  source 1..20: mol_type = genomic RNA
ttgcaagctatgggcccacg

SEQ ID NO: 30327 - RNA, 20 nt, African swine fever virus
  source 1..20: mol_type = genomic RNA
atacgccgttgcaagctatg

SEQ ID NO: 30328 - RNA, 20 nt, African swine fever virus
  source 1..20: mol_type = genomic RNA
acctatcaccagcgcctgca

SEQ ID NO: 30329 - RNA, 20 nt, African swine fever virus
  source 1..20: mol_type = genomic RNA
tcttcataggaccgacctat

SEQ ID NO: 30330 - RNA, 20 nt, African swine fever virus
  source 1..20: mol_type = genomic RNA
gcgagtactttgatgcggcc

SEQ ID NO: 30331 - RNA, 20 nt, African swine fever virus
  source 1..20: mol_type = genomic RNA
gaccggcgagtactttgatg

SEQ ID NO: 30332 - RNA, 20 nt, African swine fever virus
  source 1..20: mol_type = genomic RNA
cccgaatgaccaacggtcaa

SEQ ID NO: 30333 - RNA, 20 nt, African swine fever virus
  source 1..20: mol_type = genomic RNA
tcccgaatgaccaacggtca

SEQ ID NO: 30334 - RNA, 20 nt, African swine fever virus
  source 1..20: mol_type = genomic RNA
ctcacatccctcccgaatga

SEQ ID NO: 30335 - RNA, 20 nt, African swine fever virus
  source 1..20: mol_type = genomic RNA
ccactcacatccctcccgaa

SEQ ID NO: 30336 - RNA, 20 nt, African swine fever virus
  source 1..20: mol_type = genomic RNA
atgacgagatctttggcctc

SEQ ID NO: 30337 - RNA, 20 nt, African swine fever virus
  source 1..20: mol_type = genomic RNA
aatgacgagatctttggcct

SEQ ID NO: 30338 - RNA, 20 nt, African swine fever virus
  source 1..20: mol_type = genomic RNA
tgggcccaatgacgagatct

SEQ ID NO: 30339 - RNA, 20 nt, African swine fever virus
  source 1..20: mol_type = genomic RNA
atgggcccaatgacgagatc

SEQ ID NO: 30340 - RNA, 20 nt, African swine fever virus
  source 1..20: mol_type = genomic RNA
catgggcccaatgacgagat

SEQ ID NO: 30341 - RNA, 20 nt, African swine fever virus
  source 1..20: mol_type = genomic RNA
tcgtggatgctgtgatgcgt

SEQ ID NO: 30342 - RNA, 20 nt, African swine fever virus
  source 1..20: mol_type = genomic RNA
gccgtcgtggatgctgtgat

SEQ ID NO: 30343 - RNA, 20 nt, African swine fever virus
  source 1..20: mol_type = genomic RNA
gtctgtcatgtacggcttcg

SEQ ID NO: 30344 - RNA, 20 nt, African swine fever virus
  source 1..20: mol_type = genomic RNA
gcaccttctaccgagaagaa

SEQ ID NO: 30345 - RNA, 20 nt, African swine fever virus
  source 1..20: mol_type = genomic RNA
atatgatctacggcggctac

SEQ ID NO: 30346 - RNA, 20 nt, African swine fever virus
  source 1..20: mol_type = genomic RNA
ttgtggcctatatgatctac

SEQ ID NO: 30347 - RNA, 20 nt, African swine fever virus
  source 1..20: mol_type = genomic RNA
aacgggcttaataccattgt

SEQ ID NO: 30348 - RNA, 20 nt, African swine fever virus
  source 1..20: mol_type = genomic RNA
acctgctcgtgttacttatg

SEQ ID NO: 30349 - RNA, 20 nt, African swine fever virus
  source 1..20: mol_type = genomic RNA
aacctgctcgtgttacttat

SEQ ID NO: 30350 - RNA, 20 nt, African swine fever virus
  source 1..20: mol_type = genomic RNA
tctctatcatcgagctacgc

SEQ ID NO: 30351 - RNA, 20 nt, African swine fever virus
  source 1..20: mol_type = genomic RNA
gttacaaggccgcagaggcc

SEQ ID NO: 30352 - RNA, 20 nt, African swine fever virus
  source 1..20: mol_type = genomic RNA
ctgctcattgtagataataa

SEQ ID NO: 30353 - RNA, 20 nt, African swine fever virus
  source 1..20: mol_type = genomic RNA
tctactgggatagcatggta

SEQ ID NO: 30354 - RNA, 20 nt, African swine fever virus
  source 1..20: mol_type = genomic RNA
cataccaccatctactggga

SEQ ID NO: 30355 - RNA, 20 nt, African swine fever virus
  source 1..20: mol_type = genomic RNA
tgagggcaagattgtgcatc

SEQ ID NO: 30356 - RNA, 20 nt, African swine fever virus
  source 1..20: mol_type = genomic RNA
ttgagcttgctcagcggtat

SEQ ID NO: 30357 - RNA, 20 nt, African swine fever virus
  source 1..20: mol_type = genomic RNA
agcgcgcgtatttatcaacg

SEQ ID NO: 30358 - RNA, 20 nt, African swine fever virus
  source 1..20: mol_type = genomic RNA
gccattcaacagttagccga

SEQ ID NO: 30359 - RNA, 20 nt, African swine fever virus
  source 1..20: mol_type = genomic RNA
tctatcagatccggccattc

SEQ ID NO: 30360 - RNA, 20 nt, African swine fever virus
  source 1..20: mol_type = genomic RNA
ctggagaagtactttcgtta

SEQ ID NO: 30361 - RNA, 20 nt, African swine fever virus
  source 1..20: mol_type = genomic RNA
atgtctgtaccgctggagaa

SEQ ID NO: 30362 - RNA, 20 nt, African swine fever virus
  source 1..20: mol_type = genomic RNA
ttaccgccaatgtctgtacc

SEQ ID NO: 30363 - RNA, 20 nt, African swine fever virus
  source 1..20: mol_type = genomic RNA
agtcagccgatactggtgaa

SEQ ID NO: 30364 - RNA, 20 nt, African swine fever virus
  source 1..20: mol_type = genomic RNA
ggatacatctgcgtagccca

SEQ ID NO: 30365 - RNA, 20 nt, African swine fever virus
  source 1..20: mol_type = genomic RNA
atctcaatcgcagtatggaa

SEQ ID NO: 30366 - RNA, 20 nt, African swine fever virus
  source 1..20: mol_type = genomic RNA
ccgatctcaatcgcagtatg

SEQ ID NO: 30367 - RNA, 20 nt, African swine fever virus
  source 1..20: mol_type = genomic RNA
cctccgatctcaatcgcagt

SEQ ID NO: 30368 - RNA, 20 nt, African swine fever virus
  source 1..20: mol_type = genomic RNA
agcgggtgcacggctcaggg

SEQ ID NO: 30369 - RNA, 20 nt, African swine fever virus
  source 1..20: mol_type = genomic RNA
caccaagcgggtgcacggct

SEQ ID NO: 30370 - RNA, 20 nt, African swine fever virus
  source 1..20: mol_type = genomic RNA
tgatagctaccgcaccaagc

SEQ ID NO: 30371 - RNA, 20 nt, African swine fever virus
  source 1..20: mol_type = genomic RNA
cggaccgtgatagctaccgc

SEQ ID NO: 30372 - RNA, 20 nt, African swine fever virus
  source 1..20: mol_type = genomic RNA
acggaccgtgatagctaccg

SEQ ID NO: 30373 - RNA, 20 nt, African swine fever virus
  source 1..20: mol_type = genomic RNA
cccacggaccgtgatagcta

SEQ ID NO: 30374 - RNA, 20 nt, African swine fever virus
  source 1..20: mol_type = genomic RNA
aaccgcagatacacgtgtac

SEQ ID NO: 30375 - RNA, 20 nt, African swine fever virus
  source 1..20: mol_type = genomic RNA
gtccaacacgagccgaaccg

SEQ ID NO: 30376 - RNA, 20 nt, African swine fever virus
  source 1..20: mol_type = genomic RNA
atatttcaaccggtccaaca

SEQ ID NO: 30377 - RNA, 20 nt, African swine fever virus
  source 1..20: mol_type = genomic RNA
catatttcaaccggtccaac

SEQ ID NO: 30378 - RNA, 20 nt, African swine fever virus
  source 1..20: mol_type = genomic RNA
gtgaataccttcatgataga

SEQ ID NO: 30379 - RNA, 20 nt, African swine fever virus
  source 1..20: mol_type = genomic RNA
taccatgcaacaagggaata

SEQ ID NO: 30380 - RNA, 20 nt, African swine fever virus
  source 1..20: mol_type = genomic RNA
gcggctactttatagcccga

SEQ ID NO: 30381 - RNA, 20 nt, African swine fever virus
  source 1..20: mol_type = genomic RNA
ggcggctactttatagcccg

SEQ ID NO: 30382 - RNA, 20 nt, African swine fever virus
  source 1..20: mol_type = genomic RNA
aatgaacccggcggctactt

SEQ ID NO: 30383 - RNA, 20 nt, African swine fever virus
  source 1..20: mol_type = genomic RNA
taatgaacccggcggctact

SEQ ID NO: 30384 - RNA, 20 nt, African swine fever virus
  source 1..20: mol_type = genomic RNA
gttaatctagccgccgaggt

SEQ ID NO: 30385 - RNA, 20 nt, African swine fever virus
  source 1..20: mol_type = genomic RNA
tgttaatctagccgccgagg

SEQ ID NO: 30386 - RNA, 20 nt, African swine fever virus
  source 1..20: mol_type = genomic RNA
attcgggccctgttaatcta

SEQ ID NO: 30387 - RNA, 20 nt, African swine fever virus
  source 1..20: mol_type = genomic RNA
ttcctattcgggccctgtta

SEQ ID NO: 30388 - RNA, 20 nt, African swine fever virus
  source 1..20: mol_type = genomic RNA
tggataatgaggagcttaca

SEQ ID NO: 30389 - RNA, 20 nt, African swine fever virus
  source 1..20: mol_type = genomic RNA
ctggttccgttgccgtgata

SEQ ID NO: 30390 - RNA, 20 nt, African swine fever virus
  source 1..20: mol_type = genomic RNA
atgacggacttggagtgttg

SEQ ID NO: 30391 - RNA, 20 nt, African swine fever virus
  source 1..20: mol_type = genomic RNA
ctatgacggacttggagtgt

SEQ ID NO: 30392 - RNA, 20 nt, African swine fever virus
  source 1..20: mol_type = genomic RNA
aggataagactcaatacgat

SEQ ID NO: 30393 - RNA, 20 nt, African swine fever virus
  source 1..20: mol_type = genomic RNA
cctaggataagactcaatac

SEQ ID NO: 30394 - RNA, 20 nt, African swine fever virus
  source 1..20: mol_type = genomic RNA
ccacctaggataagactcaa

SEQ ID NO: 30395 - RNA, 20 nt, African swine fever virus
  source 1..20: mol_type = genomic RNA
ccgccacctaggataagact

SEQ ID NO: 30396 - RNA, 20 nt, African swine fever virus
  source 1..20: mol_type = genomic RNA
tcacctcattaagaagaata

SEQ ID NO: 30397 - RNA, 20 nt, African swine fever virus
  source 1..20: mol_type = genomic RNA
ttgaacatatcaatactacc

SEQ ID NO: 30398 - RNA, 20 nt, African swine fever virus
  source 1..20: mol_type = genomic RNA
tcctggaagctcacaattgc

SEQ ID NO: 30399 - RNA, 20 nt, African swine fever virus
  source 1..20: mol_type = genomic RNA
gggcatctgtttccgaactg

SEQ ID NO: 30400 - RNA, 20 nt, African swine fever virus
  source 1..20: mol_type = genomic RNA
tagtggtcttccagggcatc

SEQ ID NO: 30401 - RNA, 20 nt, African swine fever virus
  source 1..20: mol_type = genomic RNA
tcagcggtatatagatggat

SEQ ID NO: 30402 - RNA, 20 nt, African swine fever virus
  source 1..20: mol_type = genomic RNA
ccgtcagcggtatatagatg

SEQ ID NO: 30403 - RNA, 20 nt, African swine fever virus
  source 1..20: mol_type = genomic RNA
tacattaatacctccgtcag

SEQ ID NO: 30404 - RNA, 20 nt, African swine fever virus
  source 1..20: mol_type = genomic RNA
cctttgctaaggctcaacaa

SEQ ID NO: 30405 - RNA, 20 nt, African swine fever virus
  source 1..20: mol_type = genomic RNA
agaggaggtaggtttggtaa

SEQ ID NO: 30406 - RNA, 20 nt, African swine fever virus
  source 1..20: mol_type = genomic RNA
gatctccatgccacattcct

SEQ ID NO: 30407 - RNA, 20 nt, African swine fever virus
  source 1..20: mol_type = genomic RNA
agtgcggtggcgaagttatc

SEQ ID NO: 30408 - RNA, 20 nt, African swine fever virus
  source 1..20: mol_type = genomic RNA
acccaatcattaggacagta

SEQ ID NO: 30409 - RNA, 20 nt, African swine fever virus
  source 1..20: mol_type = genomic RNA
cgtaatattaccgtattgtt

SEQ ID NO: 30410 - RNA, 20 nt, African swine fever virus
  source 1..20: mol_type = genomic RNA
ccatatgtatcattaattgt

SEQ ID NO: 30411 - RNA, 20 nt, African swine fever virus
  source 1..20: mol_type = genomic RNA
taagatgcgtcatagcagta

SEQ ID NO: 30412 - RNA, 20 nt, African swine fever virus
  source 1..20: mol_type = genomic RNA
aatgagctacggaacaagta

SEQ ID NO: 30413 - RNA, 20 nt, African swine fever virus
  source 1..20: mol_type = genomic RNA
ttgctaatgcttataagcat

SEQ ID NO: 30414 - RNA, 20 nt, African swine fever virus
  source 1..20: mol_type = genomic RNA
agcattctacgggctgattt

SEQ ID NO: 30415 - RNA, 20 nt, African swine fever virus
  source 1..20: mol_type = genomic RNA
atgggtgaggatgtatctga

SEQ ID NO: 30416 - RNA, 20 nt, African swine fever virus
  source 1..20: mol_type = genomic RNA
tttagcatcgaggatgttga

SEQ ID NO: 30417 - RNA, 20 nt, African swine fever virus
  source 1..20: mol_type = genomic RNA
tggatgacatctcggcctac

SEQ ID NO: 30418 - RNA, 20 nt, African swine fever virus
  source 1..20: mol_type = genomic RNA
gcgccttgctttactctata

SEQ ID NO: 30419 - RNA, 20 nt, African swine fever virus
  source 1..20: mol_type = genomic RNA
acgggtaacagatcctgcca

SEQ ID NO: 30420 - RNA, 20 nt, African swine fever virus
  source 1..20: mol_type = genomic RNA
aggctcatggcggtcgactc

SEQ ID NO: 30421 - RNA, 20 nt, African swine fever virus
  source 1..20: mol_type = genomic RNA
caatggatgatccaaggctc

SEQ ID NO: 30422 - RNA, 20 nt, African swine fever virus
  source 1..20: mol_type = genomic RNA
acctcaatggatgatccaag

SEQ ID NO: 30423 - RNA, 20 nt, African swine fever virus
  source 1..20: mol_type = genomic RNA
ccacctacctcaatggatga

SEQ ID NO: 30424 - RNA, 20 nt, African swine fever virus
  source 1..20: mol_type = genomic RNA
caggagccatggaccttcga

SEQ ID NO: 30425 - RNA, 20 nt, African swine fever virus
  source 1..20: mol_type = genomic RNA
cgtgctacaacatgaggtgg

SEQ ID NO: 30426 - RNA, 20 nt, African swine fever virus
  source 1..20: mol_type = genomic RNA
ttatgcgcttgccgatctac

SEQ ID NO: 30427 - RNA, 20 nt, African swine fever virus
  source 1..20: mol_type = genomic RNA
ccgagattgaagtaacacgc

SEQ ID NO: 30428 - RNA, 20 nt, African swine fever virus
  source 1..20: mol_type = genomic RNA
tttacgtttacaaggccgtc

SEQ ID NO: 30429 - RNA, 20 nt, African swine fever virus
  source 1..20: mol_type = genomic RNA
cataagtggaccatttacgt

SEQ ID NO: 30430 - RNA, 20 nt, African swine fever virus
  source 1..20: mol_type = genomic RNA
acggactcggctgtttgagt

SEQ ID NO: 30431 - RNA, 20 nt, African swine fever virus
  source 1..20: mol_type = genomic RNA
aacacaggaagagccgacca

SEQ ID NO: 30432 - RNA, 20 nt, African swine fever virus
  source 1..20: mol_type = genomic RNA
tagagcctatgaattatttc

SEQ ID NO: 30433 - RNA, 20 nt, African swine fever virus
  source 1..20: mol_type = genomic RNA
cggccgagctattatcgcaa

SEQ ID NO: 30434 - RNA, 20 nt, African swine fever virus
  source 1..20: mol_type = genomic RNA
aggaggctgaatatgagttt

SEQ ID NO: 30435 - RNA, 20 nt, African swine fever virus
  source 1..20: mol_type = genomic RNA
aaggaggctgaatatgagtt

SEQ ID NO: 30436 - RNA, 20 nt, African swine fever virus
  source 1..20: mol_type = genomic RNA
cggactcccaaggaggctga

SEQ ID NO: 30437 - RNA, 20 nt, African swine fever virus
  source 1..20: mol_type = genomic RNA
tattgacggcagcatcccta

SEQ ID NO: 30438 - RNA, 20 nt, African swine fever virus
  source 1..20: mol_type = genomic RNA
ctgtggcccgtattgacggc

SEQ ID NO: 30439 - RNA, 20 nt, African swine fever virus
  source 1..20: mol_type = genomic RNA
tgtatgattatgctgccact

SEQ ID NO: 30440 - RNA, 20 nt, African swine fever virus
  source 1..20: mol_type = genomic RNA
atgtatgattatgctgccac

SEQ ID NO: 30441 - RNA, 20 nt, African swine fever virus
  source 1..20: mol_type = genomic RNA
ttaacgcagctgtatgctgt

SEQ ID NO: 30442 - RNA, 20 nt, African swine fever virus
  source 1..20: mol_type = genomic RNA
gccgctcgtgtatagcatcg

SEQ ID NO: 30443 - RNA, 20 nt, African swine fever virus
  source 1..20: mol_type = genomic RNA
gcacgtttatccactttgga

SEQ ID NO: 30444 - RNA, 20 nt, African swine fever virus
  source 1..20: mol_type = genomic RNA
tgaaggcctgcacgtttatc

SEQ ID NO: 30445 - RNA, 20 nt, African swine fever virus
  source 1..20: mol_type = genomic RNA
acgacaccatgcgaaccaag

SEQ ID NO: 30446 - RNA, 20 nt, African swine fever virus
  source 1..20: mol_type = genomic RNA
tgtggacatgcttatacagc

SEQ ID NO: 30447 - RNA, 20 nt, African swine fever virus
  source 1..20: mol_type = genomic RNA
tgctttatgacctatataga

SEQ ID NO: 30448 - RNA, 20 nt, African swine fever virus
  source 1..20: mol_type = genomic RNA
gtatatcgaactttataagt

SEQ ID NO: 30449 - RNA, 20 nt, African swine fever virus
  source 1..20: mol_type = genomic RNA
gtttacgcaccagtatatcg

SEQ ID NO: 30450 - RNA, 20 nt, African swine fever virus
  source 1..20: mol_type = genomic RNA
caggagccaatttgaccaat

SEQ ID NO: 30451 - RNA, 20 nt, African swine fever virus
  source 1..20: mol_type = genomic RNA
tgggctacgtcgcctcagga

SEQ ID NO: 30452 - RNA, 20 nt, African swine fever virus
  source 1..20: mol_type = genomic RNA
cagtgctttatgcgtatggc

SEQ ID NO: 30453 - RNA, 20 nt, African swine fever virus
  source 1..20: mol_type = genomic RNA
cgcagtgctttatgcgtatg

SEQ ID NO: 30454 - RNA, 20 nt, African swine fever virus
  source 1..20: mol_type = genomic RNA
ggccgttcccgcagaagccc

SEQ ID NO: 30455 - RNA, 20 nt, African swine fever virus
  source 1..20: mol_type = genomic RNA
acatacgtcaactgctagta

SEQ ID NO: 30456 - RNA, 20 nt, African swine fever virus
  source 1..20: mol_type = genomic RNA
tggaggcctacatacgtcaa

SEQ ID NO: 30457 - RNA, 20 nt, African swine fever virus
  source 1..20: mol_type = genomic RNA
atggaggcctacatacgtca

SEQ ID NO: 30458 - RNA, 20 nt, African swine fever virus
  source 1..20: mol_type = genomic RNA
tgttcgcgccgagcagtcaa

SEQ ID NO: 30459 - RNA, 20 nt, African swine fever virus
  source 1..20: mol_type = genomic RNA
tggcacagatatcttatcgc

SEQ ID NO: 30460 - RNA, 20 nt, African swine fever virus
  source 1..20: mol_type = genomic RNA
ccgtggcacagatatcttat

SEQ ID NO: 30461 - RNA, 20 nt, African swine fever virus
  source 1..20: mol_type = genomic RNA
gtccgttgcacatggttgtt

SEQ ID NO: 30462 - RNA, 20 nt, African swine fever virus
  source 1..20: mol_type = genomic RNA
tgggtacttgctaggcacca

SEQ ID NO: 30463 - RNA, 20 nt, African swine fever virus
  source 1..20: mol_type = genomic RNA
acagtagttactcacatcat

SEQ ID NO: 30464 - RNA, 20 nt, African swine fever virus
  source 1..20: mol_type = genomic RNA
atcgtatagcagtaatcggg

SEQ ID NO: 30465 - RNA, 20 nt, African swine fever virus
  source 1..20: mol_type = genomic RNA
aattccaatcgtatagcagt

SEQ ID NO: 30466 - RNA, 20 nt, African swine fever virus
  source 1..20: mol_type = genomic RNA
tagtattctggatataccgt

SEQ ID NO: 30467 - RNA, 20 nt, African swine fever virus
  source 1..20: mol_type = genomic RNA
atatagccgtagtattctgg

SEQ ID NO: 30468 - RNA, 20 nt, African swine fever virus
  source 1..20: mol_type = genomic RNA
ggaatgcctatatagccgta

SEQ ID NO: 30469 - RNA, 20 nt, African swine fever virus
  source 1..20: mol_type = genomic RNA
cacatgcgtcccgtatttaa

SEQ ID NO: 30470 - RNA, 20 nt, African swine fever virus
  source 1..20: mol_type = genomic RNA
cgttacatgtcctttcgctt

SEQ ID NO: 30471 - RNA, 20 nt, African swine fever virus
  source 1..20: mol_type = genomic RNA
aatagcgcagcagtgagggt

SEQ ID NO: 30472 - RNA, 20 nt, African swine fever virus
  source 1..20: mol_type = genomic RNA
gactgctgcataggatagcc

SEQ ID NO: 30473 - RNA, 20 nt, African swine fever virus
  source 1..20: mol_type = genomic RNA
tataacctgactgctgcata

SEQ ID NO: 30474 - RNA, 20 nt, African swine fever virus
  source 1..20: mol_type = genomic RNA
cgctatcacggttccagtaa

SEQ ID NO: 30475 - RNA, 20 nt, African swine fever virus
  source 1..20: mol_type = genomic RNA
gtattcgccatcgtgtgatt

SEQ ID NO: 30476 - RNA, 20 nt, African swine fever virus
  source 1..20: mol_type = genomic RNA
ctatgaagggttggtaccaa

SEQ ID NO: 30477 - RNA, 20 nt, African swine fever virus
  source 1..20: mol_type = genomic RNA
ctatggcattataagcctct

SEQ ID NO: 30478 - RNA, 20 nt, African swine fever virus
  source 1..20: mol_type = genomic RNA
cctctatggcattataagcc

SEQ ID NO: 30479 - RNA, 20 nt, African swine fever virus
  source 1..20: mol_type = genomic RNA
gggccgcctctatggcatta

SEQ ID NO: 30480 - RNA, 20 nt, African swine fever virus
  source 1..20: mol_type = genomic RNA
caatgaggttcaggataatg

SEQ ID NO: 30481 - RNA, 20 nt, African swine fever virus
  source 1..20: mol_type = genomic RNA
tcacaataatatagtcggaa

SEQ ID NO: 30482 - RNA, 20 nt, African swine fever virus
  source 1..20: mol_type = genomic RNA
tagtaagtccttatgggctt

SEQ ID NO: 30483 - RNA, 20 nt, African swine fever virus
  source 1..20: mol_type = genomic RNA
ttgatgactaagtcggaaca

SEQ ID NO: 30484 - RNA, 20 nt, African swine fever virus
  source 1..20: mol_type = genomic RNA
attgatgactaagtcggaac

SEQ ID NO: 30485 - RNA, 20 nt, African swine fever virus
  source 1..20: mol_type = genomic RNA
acgtactctgtggtaatcat

SEQ ID NO: 30486 - RNA, 20 nt, African swine fever virus
  source 1..20: mol_type = genomic RNA
tctatgtgcttgaacacgta

SEQ ID NO: 30487 - RNA, 20 nt, African swine fever virus
  source 1..20: mol_type = genomic RNA
atctatgtgcttgaacacgt

SEQ ID NO: 30488 - RNA, 20 nt, African swine fever virus
  source 1..20: mol_type = genomic RNA
aacccatctatgtgcttgaa

SEQ ID NO: 30489 - RNA, 20 nt, African swine fever virus
  source 1..20: mol_type = genomic RNA
tactgccgctcaagcttaat

SEQ ID NO: 30490 - RNA, 20 nt, African swine fever virus
  source 1..20: mol_type = genomic RNA
cggcgtgcgtcaagatttct

SEQ ID NO: 30491 - RNA, 20 nt, African swine fever virus
  source 1..20: mol_type = genomic RNA
tcggcgtgcgtcaagatttc

SEQ ID NO: 30492 - RNA, 20 nt, African swine fever virus
  source 1..20: mol_type = genomic RNA
tgaacgctttcgccgcagct

SEQ ID NO: 30493 - RNA, 20 nt, African swine fever virus
  source 1..20: mol_type = genomic RNA
ttgaacgctttcgccgcagc

SEQ ID NO: 30494 - RNA, 20 nt, African swine fever virus
  source 1..20: mol_type = genomic RNA
cttgaacgctttcgccgcag

SEQ ID NO: 30495 - RNA, 20 nt, African swine fever virus
  source 1..20: mol_type = genomic RNA
gtgtggtacaccttgctaga

SEQ ID NO: 30496 - RNA, 20 nt, African swine fever virus
  source 1..20: mol_type = genomic RNA
ggtgtggtacaccttgctag

SEQ ID NO: 30497 - RNA, 20 nt, African swine fever virus
  source 1..20: mol_type = genomic RNA
cagcggcacaccaatataat

SEQ ID NO: 30498 - RNA, 20 nt, African swine fever virus
  source 1..20: mol_type = genomic RNA
catttgagagctggcccgcc

SEQ ID NO: 30499 - RNA, 20 nt, African swine fever virus
  source 1..20: mol_type = genomic RNA
tacattcacacctcatttga

SEQ ID NO: 30500 - RNA, 20 nt, African swine fever virus
  source 1..20: mol_type = genomic RNA
tgaactgttaggctacagcc

SEQ ID NO: 30501 - RNA, 20 nt, African swine fever virus
  source 1..20: mol_type = genomic RNA
aactacaggacactaagttt

SEQ ID NO: 30502 - RNA, 20 nt, African swine fever virus
  source 1..20: mol_type = genomic RNA
tctgcgatgtagttcgcgat

SEQ ID NO: 30503 - RNA, 20 nt, African swine fever virus
  source 1..20: mol_type = genomic RNA
ttataattattatccgggca

SEQ ID NO: 30504 - RNA, 20 nt, African swine fever virus
  source 1..20: mol_type = genomic RNA
gacgtttcaacactccctta

SEQ ID NO: 30505 - RNA, 20 nt, African swine fever virus
  source 1..20: mol_type = genomic RNA
agacgtttcaacactccctt

SEQ ID NO: 30506 - RNA, 20 nt, African swine fever virus
  source 1..20: mol_type = genomic RNA
ggctaacgacgtacaacagt

SEQ ID NO: 30507 - RNA, 20 nt, African swine fever virus
  source 1..20: mol_type = genomic RNA
tggctaacgacgtacaacag

SEQ ID NO: 30508 - RNA, 20 nt, African swine fever virus
  source 1..20: mol_type = genomic RNA
ttagcccggcatatagaatc

SEQ ID NO: 30509 - RNA, 20 nt, African swine fever virus
  source 1..20: mol_type = genomic RNA
tttgtattaacaacgcgcgt

SEQ ID NO: 30510 - RNA, 20 nt, African swine fever virus
  source 1..20: mol_type = genomic RNA
tatattcaagacgaacgaca

SEQ ID NO: 30511 - RNA, 20 nt, African swine fever virus
  source 1..20: mol_type = genomic RNA
ctatattcaagacgaacgac

SEQ ID NO: 30512 - RNA, 20 nt, African swine fever virus
  source 1..20: mol_type = genomic RNA
cctatattcaagacgaacga

SEQ ID NO: 30513 - RNA, 20 nt, African swine fever virus
  source 1..20: mol_type = genomic RNA
gactgagatatgtgagccct

SEQ ID NO: 30514 - RNA, 20 nt, African swine fever virus
  source 1..20: mol_type = genomic RNA
tcacctgactgagatatgtg

SEQ ID NO: 30515 - RNA, 20 nt, African swine fever virus
  source 1..20: mol_type = genomic RNA
cgctggtgttagcgacgtac

SEQ ID NO: 30516 - RNA, 20 nt, African swine fever virus
  source 1..20: mol_type = genomic RNA
gcgctggtgttagcgacgta

SEQ ID NO: 30517 - RNA, 20 nt, African swine fever virus
  source 1..20: mol_type = genomic RNA
atcccgcgctggtgttagcg

SEQ ID NO: 30518 - RNA, 20 nt, African swine fever virus
  source 1..20: mol_type = genomic RNA
aagcctatcccgcgctggtg

SEQ ID NO: 30519 - RNA, 20 nt, African swine fever virus
  source 1..20: mol_type = genomic RNA
caaccatcttactcctacca

SEQ ID NO: 30520 - RNA, 20 nt, African swine fever virus
  source 1..20: mol_type = genomic RNA
tacacggctttgcggcatac

SEQ ID NO: 30521 - RNA, 20 nt, African swine fever virus
  source 1..20: mol_type = genomic RNA
ttgttcctgtgaagtcgata

SEQ ID NO: 30522 - RNA, 20 nt, African swine fever virus
  source 1..20: mol_type = genomic RNA
gttgttcctgtgaagtcgat

SEQ ID NO: 30523 - RNA, 20 nt, African swine fever virus
  source 1..20: mol_type = genomic RNA
cattcccgttgttcctgtga

SEQ ID NO: 30524 - RNA, 20 nt, African swine fever virus
  source 1..20: mol_type = genomic RNA
gcgggccgggctacacctag

SEQ ID NO: 30525 - RNA, 20 nt, African swine fever virus
  source 1..20: mol_type = genomic RNA
attaccagcgggccgggcta

SEQ ID NO: 30526 - RNA, 20 nt, African swine fever virus
  source 1..20: mol_type = genomic RNA
gattaccagcgggccgggct

SEQ ID NO: 30527 - RNA, 20 nt, African swine fever virus
  source 1..20: mol_type = genomic RNA
cgattaccagcgggccgggc

SEQ ID NO: 30528 - RNA, 20 nt, African swine fever virus
  source 1..20: mol_type = genomic RNA
tgcgggtgcgcacggacttt

SEQ ID NO: 30529 - RNA, 20 nt, African swine fever virus
  source 1..20: mol_type = genomic RNA
tgtgcagaccatgcgggtgc

SEQ ID NO: 30530 - RNA, 20 nt, African swine fever virus
  source 1..20: mol_type = genomic RNA
cgttgaggatgcctacgaac

SEQ ID NO: 30531 - RNA, 20 nt, African swine fever virus
  source 1..20: mol_type = genomic RNA
accacgttgaggatgcctac

SEQ ID NO: 30532 - RNA, 20 nt, African swine fever virus
  source 1..20: mol_type = genomic RNA
ccaaccacgttgaggatgcc

SEQ ID NO: 30533 - RNA, 20 nt, African swine fever virus
  source 1..20: mol_type = genomic RNA
tcagctgaccgcactcttcg

SEQ ID NO: 30534 - RNA, 20 nt, African swine fever virus
  source 1..20: mol_type = genomic RNA
gtccttcagctgaccgcact

SEQ ID NO: 30535 - RNA, 20 nt, African swine fever virus
  source 1..20: mol_type = genomic RNA
cgatctttagacgagaatat

SEQ ID NO: 30536 - RNA, 20 nt, African swine fever virus
  source 1..20: mol_type = genomic RNA
acgatctttagacgagaata

SEQ ID NO: 30537 - RNA, 20 nt, African swine fever virus
  source 1..20: mol_type = genomic RNA
aatcgcgctggtgataggag

SEQ ID NO: 30538 - RNA, 20 nt, African swine fever virus
  source 1..20: mol_type = genomic RNA
ggttataactgtgagcagtt

SEQ ID NO: 30539 - RNA, 20 nt, African swine fever virus
  source 1..20: mol_type = genomic RNA
ccgtacaagcaatgtttaat

SEQ ID NO: 30540 - RNA, 20 nt, African swine fever virus
  source 1..20: mol_type = genomic RNA
cgcggcgtctgccaccgtac

SEQ ID NO: 30541 - RNA, 20 nt, African swine fever virus
  source 1..20: mol_type = genomic RNA
atgttcttctcatccgcgta

SEQ ID NO: 30542 - RNA, 20 nt, African swine fever virus
  source 1..20: mol_type = genomic RNA
gttaagatcgacgccgatgt

SEQ ID NO: 30543 - RNA, 20 nt, African swine fever virus
  source 1..20: mol_type = genomic RNA
cctgttaagatcgacgccga

SEQ ID NO: 30544 - RNA, 20 nt, African swine fever virus
  source 1..20: mol_type = genomic RNA
ctgctcgtcatgcgctgcat

SEQ ID NO: 30545 - RNA, 20 nt, African swine fever virus
  source 1..20: mol_type = genomic RNA
ttagagcgcaacagttggca

SEQ ID NO: 30546 - RNA, 20 nt, African swine fever virus
  source 1..20: mol_type = genomic RNA
ttgaggccacaaggttggtc

SEQ ID NO: 30547 - RNA, 20 nt, African swine fever virus
  source 1..20: mol_type = genomic RNA
ataacgagcgcattacctcc

SEQ ID NO: 30548 - RNA, 20 nt, African swine fever virus
  source 1..20: mol_type = genomic RNA
gataacgagcgcattacctc

SEQ ID NO: 30549 - RNA, 20 nt, African swine fever virus
  source 1..20: mol_type = genomic RNA
tctgcgagggctttgtgcag

SEQ ID NO: 30550 - RNA, 20 nt, African swine fever virus
  source 1..20: mol_type = genomic RNA
tccatctgcgagggctttgt

SEQ ID NO: 30551 - RNA, 20 nt, African swine fever virus
  source 1..20: mol_type = genomic RNA
aggacaaggacgagatcgtg

SEQ ID NO: 30552 - RNA, 20 nt, African swine fever virus
  source 1..20: mol_type = genomic RNA
tacgcaatacgccctctgtg

SEQ ID NO: 30553 - RNA, 20 nt, African swine fever virus
  source 1..20: mol_type = genomic RNA
ggcttattcgtagaatccat

SEQ ID NO: 30554 - RNA, 20 nt, African swine fever virus
  source 1..20: mol_type = genomic RNA
cggcgagatatttgcgctga

SEQ ID NO: 30555 - RNA, 20 nt, African swine fever virus
  source 1..20: mol_type = genomic RNA
tgttcattcgtaaggctcaa

SEQ ID NO: 30556 - RNA, 20 nt, African swine fever virus
  source 1..20: mol_type = genomic RNA
tacaaggcttccttgttcat

SEQ ID NO: 30557 - RNA, 20 nt, African swine fever virus
  source 1..20: mol_type = genomic RNA
cgcaatagacaggccttaca

SEQ ID NO: 30558 - RNA, 20 nt, African swine fever virus
  source 1..20: mol_type = genomic RNA
tctcagcggcaatgtctgcc

SEQ ID NO: 30559 - RNA, 20 nt, African swine fever virus
  source 1..20: mol_type = genomic RNA
agcttcgggatcatgtagca

SEQ ID NO: 30560 - RNA, 20 nt, African swine fever virus
  source 1..20: mol_type = genomic RNA
cataatactctggaggaagc

SEQ ID NO: 30561 - RNA, 20 nt, African swine fever virus
  source 1..20: mol_type = genomic RNA
aggcgaatacgacgttgctc

SEQ ID NO: 30562 - RNA, 20 nt, African swine fever virus
  source 1..20: mol_type = genomic RNA
atagttggcggatgtattgg

SEQ ID NO: 30563 - RNA, 20 nt, African swine fever virus
  source 1..20: mol_type = genomic RNA
aatacataatggaccgcttg

SEQ ID NO: 30564 - RNA, 20 nt, African swine fever virus
  source 1..20: mol_type = genomic RNA
tttgagtccacgtccaccac

SEQ ID NO: 30565 - RNA, 20 nt, African swine fever virus
  source 1..20: mol_type = genomic RNA
aacgtacttcccgtttgagt

SEQ ID NO: 30566 - RNA, 20 nt, African swine fever virus
  source 1..20: mol_type = genomic RNA
gattcattggctggcccggt

SEQ ID NO: 30567 - RNA, 20 nt, African swine fever virus
  source 1..20: mol_type = genomic RNA
ggtttacctctttgcgccac

SEQ ID NO: 30568 - RNA, 20 nt, African swine fever virus
  source 1..20: mol_type = genomic RNA
tggccacaagtcgcattaga

SEQ ID NO: 30569 - RNA, 20 nt, African swine fever virus
  source 1..20: mol_type = genomic RNA
aataccatggccacaagtcg

SEQ ID NO: 30570 - RNA, 20 nt, African swine fever virus
  source 1..20: mol_type = genomic RNA
cgacgtatttagaacctcgc

SEQ ID NO: 30571 - RNA, 20 nt, African swine fever virus
  source 1..20: mol_type = genomic RNA
tcagccgcgacgtatttaga

SEQ ID NO: 30572 - RNA, 20 nt, African swine fever virus
  source 1..20: mol_type = genomic RNA
tttccttcagccgcgacgta

SEQ ID NO: 30573 - RNA, 20 nt, African swine fever virus
  source 1..20: mol_type = genomic RNA
tcgtgtcaatgatgaagtta

SEQ ID NO: 30574 - RNA, 20 nt, African swine fever virus
  source 1..20: mol_type = genomic RNA
tggtccgtcgtgtcaatgat

SEQ ID NO: 30575 - RNA, 20 nt, African swine fever virus
  source 1..20: mol_type = genomic RNA
tgtgccgtggtccgtcgtgt

SEQ ID NO: 30576 - RNA, 20 nt, African swine fever virus
  source 1..20: mol_type = genomic RNA
cagtcttctccatgtgccgt

SEQ ID NO: 30577 - RNA, 20 nt, African swine fever virus
  source 1..20: mol_type = genomic RNA
ttgaacgataatgccgcagt

SEQ ID NO: 30578 - RNA, 20 nt, African swine fever virus
  source 1..20: mol_type = genomic RNA
tttcgctctcaatggtggga

SEQ ID NO: 30579 - RNA, 20 nt, African swine fever virus
  source 1..20: mol_type = genomic RNA
ccgtttcgctctcaatggtg

SEQ ID NO: 30580 - RNA, 20 nt, African swine fever virus
  source 1..20: mol_type = genomic RNA
atgtagcgtatcttgtgact

SEQ ID NO: 30581 - RNA, 20 nt, African swine fever virus
  source 1..20: mol_type = genomic RNA
agggcgactccacgactctt

SEQ ID NO: 30582 - RNA, 20 nt, African swine fever virus
  source 1..20: mol_type = genomic RNA
cggataggttgtacacagtt

SEQ ID NO: 30583 - RNA, 20 nt, African swine fever virus
  source 1..20: mol_type = genomic RNA
ttccgcgtaggccgtcacga

SEQ ID NO: 30584 - RNA, 20 nt, African swine fever virus
  source 1..20: mol_type = genomic RNA
gggatagctcaagggcaata

SEQ ID NO: 30585 - RNA, 20 nt, African swine fever virus
  source 1..20: mol_type = genomic RNA
atgtaggattcgccgggctg

SEQ ID NO: 30586 - RNA, 20 nt, African swine fever virus
  source 1..20: mol_type = genomic RNA
aatgtaggattcgccgggct

SEQ ID NO: 30587 - RNA, 20 nt, African swine fever virus
  source 1..20: mol_type = genomic RNA
caatgtaggattcgccgggc

SEQ ID NO: 30588 - RNA, 20 nt, African swine fever virus
  source 1..20: mol_type = genomic RNA
tcggagcacgaactgttcat

SEQ ID NO: 30589 - RNA, 20 nt, African swine fever virus
  source 1..20: mol_type = genomic RNA
tactattcgtagagacatgg

SEQ ID NO: 30590 - RNA, 20 nt, African swine fever virus
  source 1..20: mol_type = genomic RNA
atggcggcgcatcatcttac

SEQ ID NO: 30591 - RNA, 20 nt, African swine fever virus
  source 1..20: mol_type = genomic RNA
atatggacgatgtccagcat

SEQ ID NO: 30592 - RNA, 20 nt, African swine fever virus
  source 1..20: mol_type = genomic RNA
agctttgtgtccgtcctcga

SEQ ID NO: 30593 - RNA, 20 nt, African swine fever virus
  source 1..20: mol_type = genomic RNA
aggattatgctatctcccgt

SEQ ID NO: 30594 - RNA, 20 nt, African swine fever virus
  source 1..20: mol_type = genomic RNA
tcgtgcattgtaacgcctag

SEQ ID NO: 30595 - RNA, 20 nt, African swine fever virus
  source 1..20: mol_type = genomic RNA
taattgtttctgctacgaca

SEQ ID NO: 30596 - RNA, 20 nt, African swine fever virus
  source 1..20: mol_type = genomic RNA
tcgtatactttatcaataat

SEQ ID NO: 30597 - RNA, 20 nt, African swine fever virus
  source 1..20: mol_type = genomic RNA
acatgccatcgtatacttta

SEQ ID NO: 30598 - RNA, 20 nt, African swine fever virus
  source 1..20: mol_type = genomic RNA
tcttctattggcagatgatc

SEQ ID NO: 30599 - RNA, 20 nt, African swine fever virus
  source 1..20: mol_type = genomic RNA
agccgtcgtgtctgttgcgg

SEQ ID NO: 30600 - RNA, 20 nt, African swine fever virus
  source 1..20: mol_type = genomic RNA
ttgagcgagccattgtggca

SEQ ID NO: 30601 - RNA, 20 nt, African swine fever virus
  source 1..20: mol_type = genomic RNA
cggatgcgctggcatcagcc

SEQ ID NO: 30602 - RNA, 20 nt, African swine fever virus
  source 1..20: mol_type = genomic RNA
acggatgcgctggcatcagc

SEQ ID NO: 30603 - RNA, 20 nt, African swine fever virus
  source 1..20: mol_type = genomic RNA
cacggatgcgctggcatcag

SEQ ID NO: 30604 - RNA, 20 nt, African swine fever virus
  source 1..20: mol_type = genomic RNA
ccacggatgcgctggcatca

SEQ ID NO: 30605 - RNA, 20 nt, African swine fever virus
  source 1..20: mol_type = genomic RNA
cccacggatgcgctggcatc

SEQ ID NO: 30606 - RNA, 20 nt, African swine fever virus
  source 1..20: mol_type = genomic RNA
gaatgggcgggagggctcat

SEQ ID NO: 30607 - RNA, 20 nt, African swine fever virus
  source 1..20: mol_type = genomic RNA
tgaatgggcgggagggctca

SEQ ID NO: 30608 - RNA, 20 nt, African swine fever virus
  source 1..20: mol_type = genomic RNA
actaccctgaatgggcggga

SEQ ID NO: 30609 - RNA, 20 nt, African swine fever virus
  source 1..20: mol_type = genomic RNA
atcgatagtgaggcgattgc

SEQ ID NO: 30610 - RNA, 20 nt, African swine fever virus
  source 1..20: mol_type = genomic RNA
actggccgctgtataacacc

SEQ ID NO: 30611 - RNA, 20 nt, African swine fever virus
  source 1..20: mol_type = genomic RNA
ccgccaccattgatacccat

SEQ ID NO: 30612 - RNA, 20 nt, African swine fever virus
  source 1..20: mol_type = genomic RNA
aggcatcgaccttatgctca

SEQ ID NO: 30613 - RNA, 20 nt, African swine fever virus
  source 1..20: mol_type = genomic RNA
taggcatcgaccttatgctc

SEQ ID NO: 30614 - RNA, 20 nt, African swine fever virus
  source 1..20: mol_type = genomic RNA
tgagcgagccctaggcatcg

SEQ ID NO: 30615 - RNA, 20 nt, African swine fever virus
  source 1..20: mol_type = genomic RNA
ttatgattatagatgaggcc

SEQ ID NO: 30616 - RNA, 20 nt, African swine fever virus
  source 1..20: mol_type = genomic RNA
gctatgcctttatgattata

SEQ ID NO: 30617 - RNA, 20 nt, African swine fever virus
  source 1..20: mol_type = genomic RNA
aagacatcggcgcctcaacc

SEQ ID NO: 30618 - RNA, 20 nt, African swine fever virus
  source 1..20: mol_type = genomic RNA
aaccgcagtgaccctcgcca

SEQ ID NO: 30619 - RNA, 20 nt, African swine fever virus
  source 1..20: mol_type = genomic RNA
agagtcctaaccgcagtgac

SEQ ID NO: 30620 - RNA, 20 nt, African swine fever virus
  source 1..20: mol_type = genomic RNA
gccaagagtcctaaccgcag

SEQ ID NO: 30621 - RNA, 20 nt, African swine fever virus
  source 1..20: mol_type = genomic RNA
agccaagagtcctaaccgca

SEQ ID NO: 30622 - RNA, 20 nt, African swine fever virus
  source 1..20: mol_type = genomic RNA
gcccgtacacgtgttcagaa

SEQ ID NO: 30623 - RNA, 20 nt, African swine fever virus
  source 1..20: mol_type = genomic RNA
tgcccgtacacgtgttcaga

SEQ ID NO: 30624 - RNA, 20 nt, African swine fever virus
  source 1..20: mol_type = genomic RNA
cggccctgcccgtacacgtg

SEQ ID NO: 30625 - RNA, 20 nt, African swine fever virus
  source 1..20: mol_type = genomic RNA
tcgcagaccgggtgctcatt

SEQ ID NO: 30626 - RNA, 20 nt, African swine fever virus
  source 1..20: mol_type = genomic RNA
ccctcgcagaccgggtgctc

SEQ ID NO: 30627 - RNA, 20 nt, African swine fever virus
  source 1..20: mol_type = genomic RNA
ttccaacctccctcgcagac

SEQ ID NO: 30628 - RNA, 20 nt, African swine fever virus
  source 1..20: mol_type = genomic RNA
gctgagcacaagaatgatgt

SEQ ID NO: 30629 - RNA, 20 nt, African swine fever virus
  source 1..20: mol_type = genomic RNA
actttattggagcctggtca

SEQ ID NO: 30630 - RNA, 20 nt, African swine fever virus
  source 1..20: mol_type = genomic RNA
tcgcgttccataacaacgta

SEQ ID NO: 30631 - RNA, 20 nt, African swine fever virus
  source 1..20: mol_type = genomic RNA
atggatactgaactttatcg

SEQ ID NO: 30632 - RNA, 20 nt, African swine fever virus
  source 1..20: mol_type = genomic RNA
tccaatggatactgaacttt

SEQ ID NO: 30633 - RNA, 20 nt, African swine fever virus
  source 1..20: mol_type = genomic RNA
ttcagttagcggatgacatt

SEQ ID NO: 30634 - RNA, 20 nt, African swine fever virus
  source 1..20: mol_type = genomic RNA
actgggagcgctgctgtgta

SEQ ID NO: 30635 - RNA, 20 nt, African swine fever virus
  source 1..20: mol_type = genomic RNA
ctttggcgtagccaaggcgc

SEQ ID NO: 30636 - RNA, 20 nt, African swine fever virus
  source 1..20: mol_type = genomic RNA
gctttggcgtagccaaggcg

SEQ ID NO: 30637 - RNA, 20 nt, African swine fever virus
  source 1..20: mol_type = genomic RNA
cctttgacaacgatgtgaag

SEQ ID NO: 30638 - RNA, 20 nt, African swine fever virus
  source 1..20: mol_type = genomic RNA
tcctttgacaacgatgtgaa

SEQ ID NO: 30639 - RNA, 20 nt, African swine fever virus
  source 1..20: mol_type = genomic RNA
agcagtggagtactttcacg

SEQ ID NO: 30640 - RNA, 20 nt, African swine fever virus
  source 1..20: mol_type = genomic RNA
cagtaccgttaaccagtgcg

SEQ ID NO: 30641 - RNA, 20 nt, African swine fever virus
  source 1..20: mol_type = genomic RNA
cctcagtaccgttaaccagt

SEQ ID NO: 30642 - RNA, 20 nt, African swine fever virus
  source 1..20: mol_type = genomic RNA
actactcaagccctataccg

SEQ ID NO: 30643 - RNA, 20 nt, African swine fever virus
  source 1..20: mol_type = genomic RNA
gtttaagagtattgccaact

SEQ ID NO: 30644 - RNA, 20 nt, African swine fever virus
  source 1..20: mol_type = genomic RNA
cggtttaagagtattgccaa

SEQ ID NO: 30645 - RNA, 20 nt, African swine fever virus
  source 1..20: mol_type = genomic RNA
agaagacataccggtactca

SEQ ID NO: 30646 - RNA, 20 nt, African swine fever virus
  source 1..20: mol_type = genomic RNA
aagattcgcaacacggcaga

SEQ ID NO: 30647 - RNA, 20 nt, African swine fever virus
  source 1..20: mol_type = genomic RNA
acacgggcgtgccgatgctt

SEQ ID NO: 30648 - RNA, 20 nt, African swine fever virus
  source 1..20: mol_type = genomic RNA
gtacctacacgggcgtgccg

SEQ ID NO: 30649 - RNA, 20 nt, African swine fever virus
  source 1..20: mol_type = genomic RNA
ccagtacctacacgggcgtg

SEQ ID NO: 30650 - RNA, 20 nt, African swine fever virus
  source 1..20: mol_type = genomic RNA
gcactataacggatatattc

SEQ ID NO: 30651 - RNA, 20 nt, African swine fever virus
  source 1..20: mol_type = genomic RNA
ggccagcactataacggata

SEQ ID NO: 30652 - RNA, 20 nt, African swine fever virus
  source 1..20: mol_type = genomic RNA
tggcgatcagatgccgggcc

SEQ ID NO: 30653 - RNA, 20 nt, African swine fever virus
  source 1..20: mol_type = genomic RNA
tctacgaggttcagcgagca

SEQ ID NO: 30654 - RNA, 20 nt, African swine fever virus
  source 1..20: mol_type = genomic RNA
aattaggcgcaatgttgttc

SEQ ID NO: 30655 - RNA, 20 nt, African swine fever virus
  source 1..20: mol_type = genomic RNA
cgtcataaccggtattctga

SEQ ID NO: 30656 - RNA, 20 nt, African swine fever virus
  source 1..20: mol_type = genomic RNA
attataggtcagatccacct

SEQ ID NO: 30657 - RNA, 20 nt, African swine fever virus
  source 1..20: mol_type = genomic RNA
tacaagaggtaattatgcct

SEQ ID NO: 30658 - RNA, 20 nt, African swine fever virus
  source 1..20: mol_type = genomic RNA
ctacaagaggtaattatgcc

SEQ ID NO: 30659 - RNA, 20 nt, African swine fever virus
  source 1..20: mol_type = genomic RNA
tccgtgtctaatgagctaga

SEQ ID NO: 30660 - RNA, 20 nt, African swine fever virus
  source 1..20: mol_type = genomic RNA
atccgtgtctaatgagctag

SEQ ID NO: 30661 - RNA, 20 nt, African swine fever virus
  source 1..20: mol_type = genomic RNA
catccgtgtctaatgagcta

SEQ ID NO: 30662 - RNA, 20 nt, African swine fever virus
  source 1..20: mol_type = genomic RNA
gagcagaagacattcaacca

SEQ ID NO: 30663 - RNA, 20 nt, African swine fever virus
  source 1..20: mol_type = genomic RNA
gagtttaatcaagatacacc

SEQ ID NO: 30664 - RNA, 20 nt, African swine fever virus
  source 1..20: mol_type = genomic RNA
cgatctagaacaacaactaa

SEQ ID NO: 30665 - RNA, 20 nt, African swine fever virus
  source 1..20: mol_type = genomic RNA
gtgccacgatctagaacaac

SEQ ID NO: 30666 - RNA, 20 nt, African swine fever virus
  source 1..20: mol_type = genomic RNA
gataactatcctgtgccacg

SEQ ID NO: 30667 - RNA, 20 nt, African swine fever virus
  source 1..20: mol_type = genomic RNA
cattcgaggactatagtaag

SEQ ID NO: 30668 - RNA, 20 nt, African swine fever virus
  source 1..20: mol_type = genomic RNA
aacaattatcccgtgccaca

SEQ ID NO: 30669 - RNA, 20 nt, African swine fever virus
  source 1..20: mol_type = genomic RNA
gcgacttgttcaactccttt

SEQ ID NO: 30670 - RNA, 20 nt, African swine fever virus
  source 1..20: mol_type = genomic RNA
ttgttacggaatatcagtat

SEQ ID NO: 30671 - RNA, 20 nt, African swine fever virus
  source 1..20: mol_type = genomic RNA
tagtacagtgccgcttccca

SEQ ID NO: 30672 - RNA, 20 nt, African swine fever virus
  source 1..20: mol_type = genomic RNA
atttacccgccaatcttcgt

SEQ ID NO: 30673 - RNA, 20 nt, African swine fever virus
  source 1..20: mol_type = genomic RNA
agatgacaccgatttacccg

SEQ ID NO: 30674 - RNA, 20 nt, African swine fever virus
  source 1..20: mol_type = genomic RNA
taacgacccattcagggaag

SEQ ID NO: 30675 - RNA, 20 nt, African swine fever virus
  source 1..20: mol_type = genomic RNA
gatgatacgatacgggtaga

SEQ ID NO: 30676 - RNA, 20 nt, African swine fever virus
  source 1..20: mol_type = genomic RNA
ttcacacggatagcgggatt

SEQ ID NO: 30677 - RNA, 20 nt, African swine fever virus
  source 1..20: mol_type = genomic RNA
ttcaattaggcaactggaca

SEQ ID NO: 30678 - RNA, 20 nt, African swine fever virus
  source 1..20: mol_type = genomic RNA
aatgagcttcaggccgatat

SEQ ID NO: 30679 - RNA, 20 nt, African swine fever virus
  source 1..20: mol_type = genomic RNA
gagcgcatccctttacacat

SEQ ID NO: 30680 - RNA, 20 nt, African swine fever virus
  source 1..20: mol_type = genomic RNA
atttagcagatcctgagcgc

SEQ ID NO: 30681 - RNA, 20 nt, African swine fever virus
  source 1..20: mol_type = genomic RNA
gtgcaagcacagaatacacc

SEQ ID NO: 30682 - RNA, 20 nt, African swine fever virus
  source 1..20: mol_type = genomic RNA
gtgcaagcacttgtgcaagc

SEQ ID NO: 30683 - RNA, 20 nt, African swine fever virus
  source 1..20: mol_type = genomic RNA
ctatgcgccctaataagata

SEQ ID NO: 30684 - RNA, 20 nt, African swine fever virus
  source 1..20: mol_type = genomic RNA
tgtcggtatgacaatacttg

SEQ ID NO: 30685 - RNA, 20 nt, African swine fever virus
  source 1..20: mol_type = genomic RNA
atcaattcttgaatacaacc

SEQ ID NO: 30686 - RNA, 20 nt, African swine fever virus
  source 1..20: mol_type = genomic RNA
atagtgacggttagggttaa

SEQ ID NO: 30687 - RNA, 20 nt, African swine fever virus
  source 1..20: mol_type = genomic RNA
cagggatcttgtttggtccc

SEQ ID NO: 30688 - RNA, 20 nt, African swine fever virus
  source 1..20: mol_type = genomic RNA
actccggtaagtttacgcaa

SEQ ID NO: 30689 - RNA, 20 nt, African swine fever virus
  source 1..20: mol_type = genomic RNA
tactccggtaagtttacgca

SEQ ID NO: 30690 - RNA, 20 nt, African swine fever virus
  source 1..20: mol_type = genomic RNA
tacagatagattcccactca

SEQ ID NO: 30691 - RNA, 20 nt, African swine fever virus
  source 1..20: mol_type = genomic RNA
gtggtcatattaacgtatcc

SEQ ID NO: 30692 - RNA, 20 nt, African swine fever virus
  source 1..20: mol_type = genomic RNA
agtggtcatattaacgtatc

SEQ ID NO: 30693 - RNA, 20 nt, African swine fever virus
  source 1..20: mol_type = genomic RNA
acccagtggtcatattaacg

SEQ ID NO: 30694 - RNA, 20 nt, African swine fever virus
  source 1..20: mol_type = genomic RNA
cgggaggaataccaacccag

SEQ ID NO: 30695 - RNA, 20 nt, African swine fever virus
  source 1..20: mol_type = genomic RNA
ggtgcgatgatgattacctt

SEQ ID NO: 30696 - RNA, 20 nt, African swine fever virus
  source 1..20: mol_type = genomic RNA
atgatccgggtgcgatgatg

SEQ ID NO: 30697 - RNA, 20 nt, African swine fever virus
  source 1..20: mol_type = genomic RNA
gatgatccgggtgcgatgat

SEQ ID NO: 30698 - RNA, 20 nt, African swine fever virus
  source 1..20: mol_type = genomic RNA
cgatgatccgggtgcgatga

SEQ ID NO: 30699 - RNA, 20 nt, African swine fever virus
  source 1..20: mol_type = genomic RNA
ctacggaggcaatgcaatta

SEQ ID NO: 30700 - RNA, 20 nt, African swine fever virus
  source 1..20: mol_type = genomic RNA
gttacgtatccgatcacatt

SEQ ID NO: 30701 - RNA, 20 nt, African swine fever virus
  source 1..20: mol_type = genomic RNA
cgttacgtatccgatcacat

SEQ ID NO: 30702 - RNA, 20 nt, African swine fever virus
  source 1..20: mol_type = genomic RNA
gacgcatgttcatctatatc

SEQ ID NO: 30703 - RNA, 20 nt, African swine fever virus
  source 1..20: mol_type = genomic RNA
cgcagagataagctttcagg

SEQ ID NO: 30704 - RNA, 20 nt, African swine fever virus
  source 1..20: mol_type = genomic RNA
actcaccacgcagagataag

SEQ ID NO: 30705 - RNA, 20 nt, African swine fever virus
  source 1..20: mol_type = genomic RNA
agattggcacaagttcggac

SEQ ID NO: 30706 - RNA, 20 nt, African swine fever virus
  source 1..20: mol_type = genomic RNA
acctggaacatctccgatca

SEQ ID NO: 30707 - RNA, 20 nt, African swine fever virus
  source 1..20: mol_type = genomic RNA
gtagacgcaatatacgcttt

SEQ ID NO: 30708 - RNA, 20 nt, African swine fever virus
  source 1..20: mol_type = genomic RNA
agtagacgcaatatacgctt

SEQ ID NO: 30709 - RNA, 20 nt, African swine fever virus
  source 1..20: mol_type = genomic RNA
cagtagacgcaatatacgct

SEQ ID NO: 30710 - RNA, 20 nt, African swine fever virus
  source 1..20: mol_type = genomic RNA
tcggcgagcgctttatcacc

SEQ ID NO: 30711 - RNA, 20 nt, African swine fever virus
  source 1..20: mol_type = genomic RNA
ttcggcgagcgctttatcac

SEQ ID NO: 30712 - RNA, 20 nt, African swine fever virus
  source 1..20: mol_type = genomic RNA
ttcccttcggcgagcgcttt

SEQ ID NO: 30713 - RNA, 20 nt, African swine fever virus
  source 1..20: mol_type = genomic RNA
cggtatccattcccttcggc

SEQ ID NO: 30714 - RNA, 20 nt, African swine fever virus
  source 1..20: mol_type = genomic RNA
cttgcgctctggattaagct

SEQ ID NO: 30715 - RNA, 20 nt, African swine fever virus
  source 1..20: mol_type = genomic RNA
cctcttgcgctctggattaa

SEQ ID NO: 30716 - RNA, 20 nt, African swine fever virus
  source 1..20: mol_type = genomic RNA
attacggacgcaacgtatct

SEQ ID NO: 30717 - RNA, 20 nt, African swine fever virus
  source 1..20: mol_type = genomic RNA
ggaggtatcggtggagggaa

SEQ ID NO: 30718 - RNA, 20 nt, African swine fever virus
  source 1..20: mol_type = genomic RNA
ggacgaatatagttcggatg

SEQ ID NO: 30719 - RNA, 20 nt, African swine fever virus
  source 1..20: mol_type = genomic RNA
tggacgaatatagttcggat

SEQ ID NO: 30720 - RNA, 20 nt, African swine fever virus
  source 1..20: mol_type = genomic RNA
tttacacgcttgtagatccc

SEQ ID NO: 30721 - RNA, 20 nt, African swine fever virus
  source 1..20: mol_type = genomic RNA
ttagagggcgccgtttacac

SEQ ID NO: 30722 - RNA, 20 nt, African swine fever virus
  source 1..20: mol_type = genomic RNA
aacacctttagagggcgccg

SEQ ID NO: 30723 - RNA, 20 nt, African swine fever virus
  source 1..20: mol_type = genomic RNA
cgcaacggatatgactggga

SEQ ID NO: 30724 - RNA, 20 nt, African swine fever virus
  source 1..20: mol_type = genomic RNA
attcagggcacggcccagat

SEQ ID NO: 30725 - RNA, 20 nt, African swine fever virus
  source 1..20: mol_type = genomic RNA
ggcaggatgctccgattcag

SEQ ID NO: 30726 - RNA, 20 nt, African swine fever virus
  source 1..20: mol_type = genomic RNA
ccatatattgggtgcatgtc

SEQ ID NO: 30727 - RNA, 20 nt, African swine fever virus
  source 1..20: mol_type = genomic RNA
tatgttccagtagggtttga

SEQ ID NO: 30728 - RNA, 20 nt, African swine fever virus
  source 1..20: mol_type = genomic RNA
aagacttgcttaatagcagg

SEQ ID NO: 30729 - RNA, 20 nt, African swine fever virus
  source 1..20: mol_type = genomic RNA
catgcagcggcgcaccacac

SEQ ID NO: 30730 - RNA, 20 nt, African swine fever virus
  source 1..20: mol_type = genomic RNA
cacctcatgcagcggcgcac

SEQ ID NO: 30731 - RNA, 20 nt, African swine fever virus
  source 1..20: mol_type = genomic RNA
tggccgcacctcatgcagcg

SEQ ID NO: 30732 - RNA, 20 nt, African swine fever virus
  source 1..20: mol_type = genomic RNA
atgtagctacatcttatgcg

SEQ ID NO: 30733 - RNA, 20 nt, African swine fever virus
  source 1..20: mol_type = genomic RNA
catcccatgtagctacatct

SEQ ID NO: 30734 - RNA, 20 nt, African swine fever virus
  source 1..20: mol_type = genomic RNA
acacatcacgatccttacat

SEQ ID NO: 30735 - RNA, 20 nt, African swine fever virus
  source 1..20: mol_type = genomic RNA
aacacatcacgatccttaca

SEQ ID NO: 30736 - RNA, 20 nt, African swine fever virus
  source 1..20: mol_type = genomic RNA
gactacaccggcctgcacaa

SEQ ID NO: 30737 - RNA, 20 nt, African swine fever virus
  source 1..20: mol_type = genomic RNA
taactataggccagactaca

SEQ ID NO: 30738 - RNA, 20 nt, African swine fever virus
  source 1..20: mol_type = genomic RNA
ttccttaactataggccaga

SEQ ID NO: 30739 - RNA, 20 nt, African swine fever virus
  source 1..20: mol_type = genomic RNA
acaatagattcctctatgca

SEQ ID NO: 30740 - RNA, 20 nt, African swine fever virus
  source 1..20: mol_type = genomic RNA
tgattatgagcgtaagacta

SEQ ID NO: 30741 - RNA, 20 nt, African swine fever virus
  source 1..20: mol_type = genomic RNA
tattaatcatctacggtcca

SEQ ID NO: 30742 - RNA, 20 nt, African swine fever virus
  source 1..20: mol_type = genomic RNA
ccttattaatcatctacggt

SEQ ID NO: 30743 - RNA, 20 nt, African swine fever virus
  source 1..20: mol_type = genomic RNA
cggttattctctttctacgc

SEQ ID NO: 30744 - RNA, 20 nt, African swine fever virus
  source 1..20: mol_type = genomic RNA
tgcatgcaacagtagttcac

SEQ ID NO: 30745 - RNA, 20 nt, African swine fever virus
  source 1..20: mol_type = genomic RNA
aggccttgcatgcaacagta

SEQ ID NO: 30746 - RNA, 20 nt, African swine fever virus
  source 1..20: mol_type = genomic RNA
cgatagcgtatgtactgaca

SEQ ID NO: 30747 - RNA, 20 nt, African swine fever virus
  source 1..20: mol_type = genomic RNA
cgataaggtacacggcggca

SEQ ID NO: 30748 - RNA, 20 nt, African swine fever virus
  source 1..20: mol_type = genomic RNA
atcatttcgatgaagagctt

SEQ ID NO: 30749 - RNA, 20 nt, African swine fever virus
  source 1..20: mol_type = genomic RNA
accgatcatttcgatgaaga

SEQ ID NO: 30750 - RNA, 20 nt, African swine fever virus
  source 1..20: mol_type = genomic RNA
gcgccctcctatacgatgag

SEQ ID NO: 30751 - RNA, 20 nt, African swine fever virus
  source 1..20: mol_type = genomic RNA
acattaagccggcgccctcc

SEQ ID NO: 30752 - RNA, 20 nt, African swine fever virus
  source 1..20: mol_type = genomic RNA
gtggatttcctacattaagc

SEQ ID NO: 30753 - RNA, 20 nt, African swine fever virus
  source 1..20: mol_type = genomic RNA
agtggatttcctacattaag

SEQ ID NO: 30754 - RNA, 20 nt, African swine fever virus
  source 1..20: mol_type = genomic RNA
cttatgttgatgtgcactat

SEQ ID NO: 30755 - RNA, 20 nt, African swine fever virus
  source 1..20: mol_type = genomic RNA
aatgggttacccattctagc

SEQ ID NO: 30756 - RNA, 20 nt, African swine fever virus
  source 1..20: mol_type = genomic RNA
ccgtattcactactgtttcc

SEQ ID NO: 30757 - RNA, 20 nt, African swine fever virus
  source 1..20: mol_type = genomic RNA
tccgtattcactactgtttc

SEQ ID NO: 30758 - RNA, 20 nt, African swine fever virus
  source 1..20: mol_type = genomic RNA
tatgcgaacatgcaaggctg

SEQ ID NO: 30759 - RNA, 20 nt, African swine fever virus
  source 1..20: mol_type = genomic RNA
gctcggcgatttgcaacatt

SEQ ID NO: 30760 - RNA, 20 nt, African swine fever virus
  source 1..20: mol_type = genomic RNA
aagttgcagttcaatgcctt

SEQ ID NO: 30761 - RNA, 20 nt, African swine fever virus
  source 1..20: mol_type = genomic RNA
atgtacgctgataagatctt

SEQ ID NO: 30762 - RNA, 20 nt, African swine fever virus
  source 1..20: mol_type = genomic RNA
acctactttggtatagttct

SEQ ID NO: 30763 - RNA, 20 nt, African swine fever virus
  source 1..20: mol_type = genomic RNA
ttgtggactacattattagc

SEQ ID NO: 30764 - RNA, 20 nt, African swine fever virus
  source 1..20: mol_type = genomic RNA
acagtttatattgcggccgc

SEQ ID NO: 30765 - RNA, 20 nt, African swine fever virus
  source 1..20: mol_type = genomic RNA
cctgccagtattcgacccta

SEQ ID NO: 30766 - RNA, 20 nt, African swine fever virus
  source 1..20: mol_type = genomic RNA
cggtcttattaatatatata

SEQ ID NO: 30767 - RNA, 20 nt, African swine fever virus
  source 1..20: mol_type = genomic RNA
tcgaccgcggtcttattaat

SEQ ID NO: 30768 - RNA, 20 nt, African swine fever virus
  source 1..20: mol_type = genomic RNA
acacgtatgatgagttatgt

SEQ ID NO: 30769 - RNA, 20 nt, African swine fever virus
  source 1..20: mol_type = genomic RNA
gtcctacacgtatgatgagt

SEQ ID NO: 30770 - RNA, 20 nt, African swine fever virus
  source 1..20: mol_type = genomic RNA
ctccagtcctacacgtatga

SEQ ID NO: 30771 - RNA, 20 nt, African swine fever virus
  source 1..20: mol_type = genomic RNA
cctccagtcctacacgtatg

SEQ ID NO: 30772 - RNA, 20 nt, African swine fever virus
  source 1..20: mol_type = genomic RNA
ccctccagtcctacacgtat

SEQ ID NO: 30773 - RNA, 20 nt, African swine fever virus
  source 1..20: mol_type = genomic RNA
cggacgcggaacatgcttta

SEQ ID NO: 30774 - RNA, 20 nt, African swine fever virus
  source 1..20: mol_type = genomic RNA
tatcctcagcagaataaggc

SEQ ID NO: 30775 - RNA, 20 nt, African swine fever virus
  source 1..20: mol_type = genomic RNA
tcgactttgatctgcggccc

SEQ ID NO: 30776 - RNA, 20 nt, African swine fever virus
  source 1..20: mol_type = genomic RNA
atcgactttgatctgcggcc

SEQ ID NO: 30777 - RNA, 20 nt, African swine fever virus
  source 1..20: mol_type = genomic RNA
acattcatgacgacattccc

SEQ ID NO: 30778 - RNA, 20 nt, African swine fever virus
  source 1..20: mol_type = genomic RNA
gtctatgagcgagtttatgt

SEQ ID NO: 30779 - RNA, 20 nt, African swine fever virus
  source 1..20: mol_type = genomic RNA
ttatctttgacacggacgaa

SEQ ID NO: 30780 - RNA, 20 nt, African swine fever virus
  source 1..20: mol_type = genomic RNA
atcgaagaagatagccatta

SEQ ID NO: 30781 - RNA, 20 nt, African swine fever virus
  source 1..20: mol_type = genomic RNA
tatgctacgaccttcactgt

SEQ ID NO: 30782 - RNA, 20 nt, African swine fever virus
  source 1..20: mol_type = genomic RNA
tgttgccatatgctacgacc

SEQ ID NO: 30783 - RNA, 20 nt, African swine fever virus
  source 1..20: mol_type = genomic RNA
acacgccgcagtactatatt

SEQ ID NO: 30784 - RNA, 20 nt, African swine fever virus
  source 1..20: mol_type = genomic RNA
gtgaaccggattgcctttct

SEQ ID NO: 30785 - RNA, 20 nt, African swine fever virus
  source 1..20: mol_type = genomic RNA
caccaagcacacgtttgtag

SEQ ID NO: 30786 - RNA, 20 nt, African swine fever virus
  source 1..20: mol_type = genomic RNA
tcatctaagcctactagaag

SEQ ID NO: 30787 - RNA, 20 nt, African swine fever virus
  source 1..20: mol_type = genomic RNA
gactaccctcatctaagcct

SEQ ID NO: 30788 - RNA, 20 nt, African swine fever virus
  source 1..20: mol_type = genomic RNA
gcctactatagctgcccgca

SEQ ID NO: 30789 - RNA, 20 nt, African swine fever virus
  source 1..20: mol_type = genomic RNA
tcatttactcagaggccgag

SEQ ID NO: 30790 - RNA, 20 nt, African swine fever virus
  source 1..20: mol_type = genomic RNA
gtcatttactcagaggccga

SEQ ID NO: 30791 - RNA, 20 nt, African swine fever virus
  source 1..20: mol_type = genomic RNA
cggccacccgtcatttactc

SEQ ID NO: 30792 - RNA, 20 nt, African swine fever virus
  source 1..20: mol_type = genomic RNA
acggccacccgtcatttact

SEQ ID NO: 30793 - RNA, 20 nt, African swine fever virus
  source 1..20: mol_type = genomic RNA
gcgcaagtacgacacgcagg

SEQ ID NO: 30794 - RNA, 20 nt, African swine fever virus
  source 1..20: mol_type = genomic RNA
gtatgacctgcgcaagtacg

SEQ ID NO: 30795 - RNA, 20 nt, African swine fever virus
  source 1..20: mol_type = genomic RNA
gacctgtatgacctgcgcaa

SEQ ID NO: 30796 - RNA, 20 nt, African swine fever virus
  source 1..20: mol_type = genomic RNA
cgacctgtatgacctgcgca

SEQ ID NO: 30797 - RNA, 20 nt, African swine fever virus
  source 1..20: mol_type = genomic RNA
ctcagctacgtgcgcttcaa

SEQ ID NO: 30798 - RNA, 20 nt, African swine fever virus
  source 1..20: mol_type = genomic RNA
tatacgctttctagcaaggg

SEQ ID NO: 30799 - RNA, 20 nt, African swine fever virus
  source 1..20: mol_type = genomic RNA
tttggccctatacgctttct

SEQ ID NO: 30800 - RNA, 20 nt, African swine fever virus
  source 1..20: mol_type = genomic RNA
cgactttaactccgtggtgt

SEQ ID NO: 30801 - RNA, 20 nt, African swine fever virus
  source 1..20: mol_type = genomic RNA
cataacttccacggagcctg

SEQ ID NO: 30802 - RNA, 20 nt, African swine fever virus
  source 1..20: mol_type = genomic RNA
gctactcccgatattcctca

SEQ ID NO: 30803 - RNA, 20 nt, African swine fever virus
  source 1..20: mol_type = genomic RNA
atttccggctactcccgata

SEQ ID NO: 30804 - RNA, 20 nt, African swine fever virus
  source 1..20: mol_type = genomic RNA
gagcacaacaagtcattgcc

SEQ ID NO: 30805 - RNA, 20 nt, African swine fever virus
  source 1..20: mol_type = genomic RNA
atttgacttactctattacg

SEQ ID NO: 30806 - RNA, 20 nt, African swine fever virus
  source 1..20: mol_type = genomic RNA
ttgccatggaggataattac

SEQ ID NO: 30807 - RNA, 20 nt, African swine fever virus
  source 1..20: mol_type = genomic RNA
cccttatagacaacacattt

SEQ ID NO: 30808 - RNA, 20 nt, African swine fever virus
  source 1..20: mol_type = genomic RNA
atacgtggtgggcggagata

SEQ ID NO: 30809 - RNA, 20 nt, African swine fever virus
  source 1..20: mol_type = genomic RNA
aatacgtggtgggcggagat

SEQ ID NO: 30810 - RNA, 20 nt, African swine fever virus
  source 1..20: mol_type = genomic RNA
ctacgagttactctttataa

SEQ ID NO: 30811 - RNA, 20 nt, African swine fever virus
  source 1..20: mol_type = genomic RNA
tgcaacaatctcagaacggt

SEQ ID NO: 30812 - RNA, 20 nt, African swine fever virus
  source 1..20: mol_type = genomic RNA
gtgcaacaatctcagaacgg

SEQ ID NO: 30813 - RNA, 20 nt, African swine fever virus
  source 1..20: mol_type = genomic RNA
ggttctcccgtgcaacaatc

SEQ ID NO: 30814 - RNA, 20 nt, African swine fever virus
  source 1..20: mol_type = genomic RNA
tacttctgctttgtaaccgt

SEQ ID NO: 30815 - RNA, 20 nt, African swine fever virus
  source 1..20: mol_type = genomic RNA
gccgttcatacgcaatattt

SEQ ID NO: 30816 - RNA, 20 nt, African swine fever virus
  source 1..20: mol_type = genomic RNA
cggcggtgttgtaacccata

SEQ ID NO: 30817 - RNA, 20 nt, African swine fever virus
  source 1..20: mol_type = genomic RNA
ttcggtagtaacaggttgtg

SEQ ID NO: 30818 - RNA, 20 nt, African swine fever virus
  source 1..20: mol_type = genomic RNA
cgaggctcgtaggaatagtg

SEQ ID NO: 30819 - RNA, 20 nt, African swine fever virus
  source 1..20: mol_type = genomic RNA
agccgcgaggctcgtaggaa

SEQ ID NO: 30820 - RNA, 20 nt, African swine fever virus
  source 1..20: mol_type = genomic RNA
gtgtaccaagccgcgaggct

SEQ ID NO: 30821 - RNA, 20 nt, African swine fever virus
  source 1..20: mol_type = genomic RNA
taacgatgctgtggtctgtg

SEQ ID NO: 30822 - RNA, 20 nt, African swine fever virus
  source 1..20: mol_type = genomic RNA
taacagggctataggtctct

SEQ ID NO: 30823 - RNA, 20 nt, African swine fever virus
  source 1..20: mol_type = genomic RNA
gaacggttcccttaacaggg

SEQ ID NO: 30824 - RNA, 20 nt, African swine fever virus
  source 1..20: mol_type = genomic RNA
gatttgggtccggaacggtt

SEQ ID NO: 30825 - RNA, 20 nt, African swine fever virus
  source 1..20: mol_type = genomic RNA
cgtcgtttgcctgatttggg

SEQ ID NO: 30826 - RNA, 20 nt, African swine fever virus
  source 1..20: mol_type = genomic RNA
tagtgatgcacgtgctcgct

SEQ ID NO: 30827 - RNA, 20 nt, African swine fever virus
  source 1..20: mol_type = genomic RNA
gcggctgaactgttcagcaa

SEQ ID NO: 30828 - RNA, 20 nt, African swine fever virus
  source 1..20: mol_type = genomic RNA
agcggctgaactgttcagca

SEQ ID NO: 30829 - RNA, 20 nt, African swine fever virus
  source 1..20: mol_type = genomic RNA
gtgcatatatcaggagccca

SEQ ID NO: 30830 - RNA, 20 nt, African swine fever virus
  source 1..20: mol_type = genomic RNA
gtcgtaccgagaatcattga

SEQ ID NO: 30831 - RNA, 20 nt, African swine fever virus
  source 1..20: mol_type = genomic RNA
tcgaatctaacccacaattt

SEQ ID NO: 30832 - RNA, 20 nt, African swine fever virus
  source 1..20: mol_type = genomic RNA
cgtagtagatacagtcatac

SEQ ID NO: 30833 - RNA, 20 nt, African swine fever virus
  source 1..20: mol_type = genomic RNA
cccgcgtagtagatacagtc

SEQ ID NO: 30834 - RNA, 20 nt, African swine fever virus
  source 1..20: mol_type = genomic RNA
tatgtcctcccgcgtagtag

SEQ ID NO: 30835 - RNA, 20 nt, African swine fever virus
  source 1..20: mol_type = genomic RNA
tactcatcatggatagcata

SEQ ID NO: 30836 - RNA, 20 nt, African swine fever virus
  source 1..20: mol_type = genomic RNA
agcaatggtgctgcaagcaa

SEQ ID NO: 30837 - RNA, 20 nt, African swine fever virus
  source 1..20: mol_type = genomic RNA
cgagcaatggtgctgcaagc

SEQ ID NO: 30838 - RNA, 20 nt, African swine fever virus
  source 1..20: mol_type = genomic RNA
gtggtgggtttatcctgttc

SEQ ID NO: 30839 - RNA, 20 nt, African swine fever virus
  source 1..20: mol_type = genomic RNA
tccttccacgagacgattgt

SEQ ID NO: 30840 - RNA, 20 nt, African swine fever virus
  source 1..20: mol_type = genomic RNA
ggatgggattcatggataca

SEQ ID NO: 30841 - RNA, 20 nt, African swine fever virus
  source 1..20: mol_type = genomic RNA
aactggtgactcctccggct

SEQ ID NO: 30842 - RNA, 20 nt, African swine fever virus
  source 1..20: mol_type = genomic RNA
gaactggtgactcctccggc

SEQ ID NO: 30843 - RNA, 20 nt, African swine fever virus
  source 1..20: mol_type = genomic RNA
tacttgatgccgtaaccttt

SEQ ID NO: 30844 - RNA, 20 nt, African swine fever virus
  source 1..20: mol_type = genomic RNA
cggcgcatagtgtagacatg

SEQ ID NO: 30845 - RNA, 20 nt, African swine fever virus
  source 1..20: mol_type = genomic RNA
caggtattcattcacctcgg

SEQ ID NO: 30846 - RNA, 20 nt, African swine fever virus
  source 1..20: mol_type = genomic RNA
ttatcttgccgcaggtattc

SEQ ID NO: 30847 - RNA, 20 nt, African swine fever virus
  source 1..20: mol_type = genomic RNA
tacgtaggtaactggtgcca

SEQ ID NO: 30848 - RNA, 20 nt, African swine fever virus
  source 1..20: mol_type = genomic RNA
cgtaggccatacgtaggtaa

SEQ ID NO: 30849 - RNA, 20 nt, African swine fever virus
  source 1..20: mol_type = genomic RNA
gcttaatgatatctattccg

SEQ ID NO: 30850 - RNA, 20 nt, African swine fever virus
  source 1..20: mol_type = genomic RNA
taattcgcgtacctatcgtt

SEQ ID NO: 30851 - RNA, 20 nt, African swine fever virus
  source 1..20: mol_type = genomic RNA
cgcatctgtttggatgaagt

SEQ ID NO: 30852 - RNA, 20 nt, African swine fever virus
  source 1..20: mol_type = genomic RNA
agcgtgcatgcgagacataa

SEQ ID NO: 30853 - RNA, 20 nt, African swine fever virus
  source 1..20: mol_type = genomic RNA
cgataacgtaggagaagcgt

SEQ ID NO: 30854 - RNA, 20 nt, African swine fever virus
  source 1..20: mol_type = genomic RNA
aagtagcacgctgttcaacc

SEQ ID NO: 30855 - RNA, 20 nt, African swine fever virus
  source 1..20: mol_type = genomic RNA
gcgggcttaccagcgggctt

SEQ ID NO: 30856 - RNA, 20 nt, African swine fever virus
  source 1..20: mol_type = genomic RNA
gcatcagcgcattgccggct

SEQ ID NO: 30857 - RNA, 20 nt, African swine fever virus
  source 1..20: mol_type = genomic RNA
tattgtataaggcttgtaca

SEQ ID NO: 30858 - RNA, 20 nt, African swine fever virus
  source 1..20: mol_type = genomic RNA
ttattgtataaggcttgtac

SEQ ID NO: 30859 - RNA, 20 nt, African swine fever virus
  source 1..20: mol_type = genomic RNA
cttattgtataaggcttgta

SEQ ID NO: 30860 - RNA, 20 nt, African swine fever virus
  source 1..20: mol_type = genomic RNA
cgtcttattcagctttaata

SEQ ID NO: 30861 - RNA, 20 nt, African swine fever virus
  source 1..20: mol_type = genomic RNA
gctgaatgaatgttctagac

SEQ ID NO: 30862 - RNA, 20 nt, African swine fever virus
  source 1..20: mol_type = genomic RNA
cgactgggacactggttatc

SEQ ID NO: 30863 - RNA, 20 nt, African swine fever virus
  source 1..20: mol_type = genomic RNA
tcgactgggacactggttat

SEQ ID NO: 30864 - RNA, 20 nt, African swine fever virus
  source 1..20: mol_type = genomic RNA
gcattacagagtacgggttc

SEQ ID NO: 30865 - RNA, 20 nt, African swine fever virus
  source 1..20: mol_type = genomic RNA
agcattacagagtacgggtt

SEQ ID NO: 30866 - RNA, 20 nt, African swine fever virus
  source 1..20: mol_type = genomic RNA
agaactctcgcagttcagaa

SEQ ID NO: 30867 - RNA, 20 nt, African swine fever virus
  source 1..20: mol_type = genomic RNA
agagatatgcgacatcccat

SEQ ID NO: 30868 - RNA, 20 nt, African swine fever virus
  source 1..20: mol_type = genomic RNA
ttcgtatggcacctagagat

SEQ ID NO: 30869 - RNA, 20 nt, African swine fever virus
  source 1..20: mol_type = genomic RNA
gttcgtatggcacctagaga

SEQ ID NO: 30870 - RNA, 20 nt, African swine fever virus
  source 1..20: mol_type = genomic RNA
agcacaggacgagttgcacg

SEQ ID NO: 30871 - RNA, 20 nt, African swine fever virus
  source 1..20: mol_type = genomic RNA
ttataatgacaccctttacg

SEQ ID NO: 30872 - RNA, 20 nt, African swine fever virus
  source 1..20: mol_type = genomic RNA
taacagtgcgagcacaatta

SEQ ID NO: 30873 - RNA, 20 nt, African swine fever virus
  source 1..20: mol_type = genomic RNA
gtaacagtgcgagcacaatt

SEQ ID NO: 30874 - RNA, 20 nt, African swine fever virus
  source 1..20: mol_type = genomic RNA
gaggtcattgcagccgctca

SEQ ID NO: 30875 - RNA, 20 nt, African swine fever virus
  source 1..20: mol_type = genomic RNA
ctgaggtcattgcagccgct

SEQ ID NO: 30876 - RNA, 20 nt, African swine fever virus
  source 1..20: mol_type = genomic RNA
acttatagcggatttaacta

SEQ ID NO: 30877 - RNA, 20 nt, African swine fever virus
  source 1..20: mol_type = genomic RNA
ggtttggccgcaggtattca

SEQ ID NO: 30878 - RNA, 20 nt, African swine fever virus
  source 1..20: mol_type = genomic RNA
acacagtttgactatgatga

SEQ ID NO: 30879 - RNA, 20 nt, African swine fever virus
  source 1..20: mol_type = genomic RNA
tcctaagtttctttccgacc

SEQ ID NO: 30880 - RNA, 20 nt, African swine fever virus
  source 1..20: mol_type = genomic RNA
atgtttcagtctctatcacc

SEQ ID NO: 30881 - RNA, 20 nt, African swine fever virus
  source 1..20: mol_type = genomic RNA
ccatgaacactcgagaattt

SEQ ID NO: 30882 - RNA, 20 nt, African swine fever virus
  source 1..20: mol_type = genomic RNA
cggctcctcagccagatatt

SEQ ID NO: 30883 - RNA, 20 nt, African swine fever virus
  source 1..20: mol_type = genomic RNA
attataacagcgggaatagg

SEQ ID NO: 30884 - RNA, 20 nt, African swine fever virus
  source 1..20: mol_type = genomic RNA
tgctattcaggctcttcgat

SEQ ID NO: 30885 - RNA, 20 nt, African swine fever virus
  source 1..20: mol_type = genomic RNA
gtacagctctcagatatgcc

SEQ ID NO: 30886 - RNA, 20 nt, African swine fever virus
  source 1..20: mol_type = genomic RNA
ggtacaataaggagcctctt

SEQ ID NO: 30887 - RNA, 20 nt, African swine fever virus
  source 1..20: mol_type = genomic RNA
acatgaacttaccgaccatc

SEQ ID NO: 30888 - RNA, 20 nt, African swine fever virus
  source 1..20: mol_type = genomic RNA
tggaagtcctacatgaactt

SEQ ID NO: 30889 - RNA, 20 nt, African swine fever virus
  source 1..20: mol_type = genomic RNA
atgacaggactatccgtcgg

SEQ ID NO: 30890 - RNA, 20 nt, African swine fever virus
  source 1..20: mol_type = genomic RNA
actggctcgtcctaatctga

SEQ ID NO: 30891 - RNA, 20 nt, African swine fever virus
  source 1..20: mol_type = genomic RNA
acctagcacgtgataacatc

SEQ ID NO: 30892 - RNA, 20 nt, African swine fever virus
  source 1..20: mol_type = genomic RNA
gacctagcacgtgataacat

SEQ ID NO: 30893 - RNA, 20 nt, African swine fever virus
  source 1..20: mol_type = genomic RNA
acgggaactttagccaagcg

SEQ ID NO: 30894 - RNA, 20 nt, African swine fever virus
  source 1..20: mol_type = genomic RNA
gcttgtagcctcgtacattg

SEQ ID NO: 30895 - RNA, 20 nt, African swine fever virus
  source 1..20: mol_type = genomic RNA
tcgacgttatcgcctatatg

SEQ ID NO: 30896 - RNA, 20 nt, African swine fever virus
  source 1..20: mol_type = genomic RNA
atgccaacgtcaatgatgcc

SEQ ID NO: 30897 - RNA, 20 nt, African swine fever virus
  source 1..20: mol_type = genomic RNA
agaacctatgccaacgtcaa

SEQ ID NO: 30898 - RNA, 20 nt, African swine fever virus
  source 1..20: mol_type = genomic RNA
atcttattcgtaccaacaat

SEQ ID NO: 30899 - RNA, 20 nt, African swine fever virus
  source 1..20: mol_type = genomic RNA
tgtagagcaagtggtactag

SEQ ID NO: 30900 - RNA, 20 nt, African swine fever virus
  source 1..20: mol_type = genomic RNA
ctgagcgctttgaacaatat

SEQ ID NO: 30901 - RNA, 20 nt, African swine fever virus
  source 1..20: mol_type = genomic RNA
aaccctctgagcgctttgaa

SEQ ID NO: 30902 - RNA, 20 nt, African swine fever virus
  source 1..20: mol_type = genomic RNA
tataatgtactgcaacttcg

SEQ ID NO: 30903 - RNA, 20 nt, African swine fever virus
  source 1..20: mol_type = genomic RNA
ggcggtgaattaggcctgga

SEQ ID NO: 30904 - RNA, 20 nt, African swine fever virus
  source 1..20: mol_type = genomic RNA
taattgattctttgatggcc

SEQ ID NO: 30905 - RNA, 20 nt, African swine fever virus
  source 1..20: mol_type = genomic RNA
actaccaatgcgactgcacc

SEQ ID NO: 30906 - RNA, 20 nt, African swine fever virus
  source 1..20: mol_type = genomic RNA
gatccaactaccaatgcgac

SEQ ID NO: 30907 - RNA, 20 nt, African swine fever virus
  source 1..20: mol_type = genomic RNA
atcttattgactggctcgga

SEQ ID NO: 30908 - RNA, 20 nt, African swine fever virus
  source 1..20: mol_type = genomic RNA
agccaatcttattgactggc

SEQ ID NO: 30909 - RNA, 20 nt, African swine fever virus
  source 1..20: mol_type = genomic RNA
ctaacgtgaaccgagccaat

SEQ ID NO: 30910 - RNA, 20 nt, African swine fever virus
  source 1..20: mol_type = genomic RNA
ggaactcattcgccaggcta

SEQ ID NO: 30911 - RNA, 20 nt, African swine fever virus
  source 1..20: mol_type = genomic RNA
gcctacaacaagaattgggc

SEQ ID NO: 30912 - RNA, 20 nt, African swine fever virus
  source 1..20: mol_type = genomic RNA
agcctacaacaagaattggg

SEQ ID NO: 30913 - RNA, 20 nt, African swine fever virus
  source 1..20: mol_type = genomic RNA
actcccagtgggacttggta

SEQ ID NO: 30914 - RNA, 20 nt, African swine fever virus
  source 1..20: mol_type = genomic RNA
aacaggaatgctgcagccca

SEQ ID NO: 30915 - RNA, 20 nt, African swine fever virus
  source 1..20: mol_type = genomic RNA
agtggcgcccggcactatac

SEQ ID NO: 30916 - RNA, 20 nt, African swine fever virus
  source 1..20: mol_type = genomic RNA
aagtggcgcccggcactata

SEQ ID NO: 30917 - RNA, 20 nt, African swine fever virus
  source 1..20: mol_type = genomic RNA
caagtggcgcccggcactat

SEQ ID NO: 30918 - RNA, 20 nt, African swine fever virus
  source 1..20: mol_type = genomic RNA
ccgataggtttattagtcct

SEQ ID NO: 30919 - RNA, 20 nt, African swine fever virus
  source 1..20: mol_type = genomic RNA
tccgataggtttattagtcc

SEQ ID NO: 30920 - RNA, 20 nt, African swine fever virus
  source 1..20: mol_type = genomic RNA
cgcaattacttccctccgat

SEQ ID NO: 30921 - RNA, 20 nt, African swine fever virus
  source 1..20: mol_type = genomic RNA
gatgaggacggctatacaca

SEQ ID NO: 30922 - RNA, 20 nt, African swine fever virus
  source 1..20: mol_type = genomic RNA
ttcttcctgatgaggacggc

SEQ ID NO: 30923 - RNA, 20 nt, African swine fever virus
  source 1..20: mol_type = genomic RNA
caggttcggcgttatcacac

SEQ ID NO: 30924 - RNA, 20 nt, African swine fever virus
  source 1..20: mol_type = genomic RNA
attgagcttattaacattgg

SEQ ID NO: 30925 - RNA, 20 nt, African swine fever virus
  source 1..20: mol_type = genomic RNA
gaggcagcggaactttactt

SEQ ID NO: 30926 - RNA, 20 nt, African swine fever virus
  source 1..20: mol_type = genomic RNA
aggacgtcttcttcaccttc

SEQ ID NO: 30927 - RNA, 20 nt, African swine fever virus
  source 1..20: mol_type = genomic RNA
ctctactgtgagagttaacg

SEQ ID NO: 30928 - RNA, 20 nt, African swine fever virus
  source 1..20: mol_type = genomic RNA
tgcttgaatatattcaacat

SEQ ID NO: 30929 - RNA, 20 nt, African swine fever virus
  source 1..20: mol_type = genomic RNA
atgtcgcccttgcagatcta

SEQ ID NO: 30930 - RNA, 20 nt, African swine fever virus
  source 1..20: mol_type = genomic RNA
ggattggagacatgcttggg

SEQ ID NO: 30931 - RNA, 20 nt, African swine fever virus
  source 1..20: mol_type = genomic RNA
tatcgggcgttctctttcca

SEQ ID NO: 30932 - RNA, 20 nt, African swine fever virus
  source 1..20: mol_type = genomic RNA
ccgtcccgtcagagcaagcc

SEQ ID NO: 30933 - RNA, 20 nt, African swine fever virus
  source 1..20: mol_type = genomic RNA
tccgtcccgtcagagcaagc

SEQ ID NO: 30934 - RNA, 20 nt, African swine fever virus
  source 1..20: mol_type = genomic RNA
aagcgttggtaccctccgtc

SEQ ID NO: 30935 - RNA, 20 nt, African swine fever virus
  source 1..20: mol_type = genomic RNA
acaaggccgaagcgttggta

SEQ ID NO: 30936 - RNA, 20 nt, African swine fever virus
  source 1..20: mol_type = genomic RNA
acgtctttacggataatgct

SEQ ID NO: 30937 - RNA, 20 nt, African swine fever virus
  source 1..20: mol_type = genomic RNA
caggtaacgactccaacgtc

SEQ ID NO: 30938 - RNA, 20 nt, African swine fever virus
  source 1..20: mol_type = genomic RNA
ccgcaggtaacgactccaac

SEQ ID NO: 30939 - RNA, 20 nt, African swine fever virus
  source 1..20: mol_type = genomic RNA
acctccgcaggtaacgactc

SEQ ID NO: 30940 - RNA, 20 nt, African swine fever virus
  source 1..20: mol_type = genomic RNA
gcagatgttggatggcgtgc

SEQ ID NO: 30941 - RNA, 20 nt, African swine fever virus
  source 1..20: mol_type = genomic RNA
cttctatcgagctctggaag

SEQ ID NO: 30942 - RNA, 20 nt, African swine fever virus
  source 1..20: mol_type = genomic RNA
gatttactccaatttaacgc

SEQ ID NO: 30943 - RNA, 20 nt, African swine fever virus
  source 1..20: mol_type = genomic RNA
agatttactccaatttaacg

SEQ ID NO: 30944 - RNA, 20 nt, African swine fever virus
  source 1..20: mol_type = genomic RNA
caaccaggcaattaatactt

SEQ ID NO: 30945 - RNA, 20 nt, African swine fever virus
  source 1..20: mol_type = genomic RNA
cgcggtcgcaggttgacctc

SEQ ID NO: 30946 - RNA, 20 nt, African swine fever virus
  source 1..20: mol_type = genomic RNA
acgcagccgcacgagaagaa

SEQ ID NO: 30947 - RNA, 20 nt, African swine fever virus
  source 1..20: mol_type = genomic RNA
tcgcgcttgatctaagtctt

SEQ ID NO: 30948 - RNA, 20 nt, African swine fever virus
  source 1..20: mol_type = genomic RNA
aacataacgaggcttcgaga

SEQ ID NO: 30949 - RNA, 20 nt, African swine fever virus
  source 1..20: mol_type = genomic RNA
tgacgccgaacataacgagg

SEQ ID NO: 30950 - RNA, 20 nt, African swine fever virus
  source 1..20: mol_type = genomic RNA
gttgcgacagacctttaatg

SEQ ID NO: 30951 - RNA, 20 nt, African swine fever virus
  source 1..20: mol_type = genomic RNA
tgaacctgttgcgacagacc

SEQ ID NO: 30952 - RNA, 20 nt, African swine fever virus
  source 1..20: mol_type = genomic RNA
tgattgaagcagtatatcgt

SEQ ID NO: 30953 - RNA, 20 nt, African swine fever virus
  source 1..20: mol_type = genomic RNA
ccaatgaagaagtcattaat

SEQ ID NO: 30954 - RNA, 20 nt, African swine fever virus
  source 1..20: mol_type = genomic RNA
ttaagcaacttcacgagcgc

SEQ ID NO: 30955 - RNA, 20 nt, African swine fever virus
  source 1..20: mol_type = genomic RNA
aactcatggactgcgcgcgg

SEQ ID NO: 30956 - RNA, 20 nt, African swine fever virus
  source 1..20: mol_type = genomic RNA
taactcatggactgcgcgcg

SEQ ID NO: 30957 - RNA, 20 nt, African swine fever virus
  source 1..20: mol_type = genomic RNA
atcctcgagccggttccacc

SEQ ID NO: 30958 - RNA, 20 nt, African swine fever virus
  source 1..20: mol_type = genomic RNA
gatcctcgagccggttccac

SEQ ID NO: 30959 - RNA, 20 nt, African swine fever virus
  source 1..20: mol_type = genomic RNA
agctgtatatgcttgcacaa

SEQ ID NO: 30960 - RNA, 20 nt, African swine fever virus
  source 1..20: mol_type = genomic RNA
tgtttgtactttgccgcgga

SEQ ID NO: 30961 - RNA, 20 nt, African swine fever virus
  source 1..20: mol_type = genomic RNA
cggtgaactccgctggagtg

SEQ ID NO: 30962 - RNA, 20 nt, African swine fever virus
  source 1..20: mol_type = genomic RNA
ctaatttcactccggtgtag

SEQ ID NO: 30963 - RNA, 20 nt, African swine fever virus
  source 1..20: mol_type = genomic RNA
gaccgctagtcggcgatcag

SEQ ID NO: 30964 - RNA, 20 nt, African swine fever virus
  source 1..20: mol_type = genomic RNA
tgatccagaccgctagtcgg

SEQ ID NO: 30965 - RNA, 20 nt, African swine fever virus
  source 1..20: mol_type = genomic RNA
gactccatgatccagaccgc

SEQ ID NO: 30966 - RNA, 20 nt, African swine fever virus
  source 1..20: mol_type = genomic RNA
caatggcaatacgcgtgcgc

SEQ ID NO: 30967 - RNA, 20 nt, African swine fever virus
  source 1..20: mol_type = genomic RNA
cctcaatggcaatacgcgtg

SEQ ID NO: 30968 - RNA, 20 nt, African swine fever virus
  source 1..20: mol_type = genomic RNA
ttccatccggtaggaccgaa

SEQ ID NO: 30969 - RNA, 20 nt, African swine fever virus
  source 1..20: mol_type = genomic RNA
tagtagccgaatcggctatg

SEQ ID NO: 30970 - RNA, 20 nt, African swine fever virus
  source 1..20: mol_type = genomic RNA
ccttagtagccgaatcggct

SEQ ID NO: 30971 - RNA, 20 nt, African swine fever virus
  source 1..20: mol_type = genomic RNA
cctccttagtagccgaatcg

SEQ ID NO: 30972 - RNA, 20 nt, African swine fever virus
  source 1..20: mol_type = genomic RNA
aataacatataggaacatcc

SEQ ID NO: 30973 - RNA, 20 nt, African swine fever virus
  source 1..20: mol_type = genomic RNA
tattgacggcattgtgatgc

SEQ ID NO: 30974 - RNA, 20 nt, African swine fever virus
  source 1..20: mol_type = genomic RNA
gcacgactaggttaggtgtt

SEQ ID NO: 30975 - RNA, 20 nt, African swine fever virus
  source 1..20: mol_type = genomic RNA
tcaacgtgcggtgcaggccg

SEQ ID NO: 30976 - RNA, 20 nt, African swine fever virus
  source 1..20: mol_type = genomic RNA
tacatagcaggacttgtaat

SEQ ID NO: 30977 - RNA, 20 nt, African swine fever virus
  source 1..20: mol_type = genomic RNA
gtggtatgcttatcgccgta

SEQ ID NO: 30978 - RNA, 20 nt, African swine fever virus
  source 1..20: mol_type = genomic RNA
tttcttcgggaatggcggtg

SEQ ID NO: 30979 - RNA, 20 nt, African swine fever virus
  source 1..20: mol_type = genomic RNA
tttgctgcgcgcggtttaag

SEQ ID NO: 30980 - RNA, 20 nt, African swine fever virus
  source 1..20: mol_type = genomic RNA
ttgtattacgcttcgctgtg

SEQ ID NO: 30981 - RNA, 20 nt, African swine fever virus
  source 1..20: mol_type = genomic RNA
taacatatttaaccgttgta

SEQ ID NO: 30982 - RNA, 20 nt, African swine fever virus
  source 1..20: mol_type = genomic RNA
tttactatgacattgaccgt

SEQ ID NO: 30983 - RNA, 20 nt, African swine fever virus
  source 1..20: mol_type = genomic RNA
cttcatcggtactgggagga

SEQ ID NO: 30984 - RNA, 20 nt, African swine fever virus
  source 1..20: mol_type = genomic RNA
tataacctcttcatcggtac

SEQ ID NO: 30985 - RNA, 20 nt, African swine fever virus
  source 1..20: mol_type = genomic RNA
tcatcttccaacggcggcga

SEQ ID NO: 30986 - RNA, 20 nt, African swine fever virus
  source 1..20: mol_type = genomic RNA
gattggccttaacgccgtct

SEQ ID NO: 30987 - RNA, 20 nt, African swine fever virus
  source 1..20: mol_type = genomic RNA
tcatgcatagaatgcgattc

SEQ ID NO: 30988 - RNA, 20 nt, African swine fever virus
  source 1..20: mol_type = genomic RNA
acttgcgtttgaatataatg

SEQ ID NO: 30989 - RNA, 20 nt, African swine fever virus
  source 1..20: mol_type = genomic RNA
ccacttgaaccatcaagtgc

SEQ ID NO: 30990 - RNA, 20 nt, African swine fever virus
  source 1..20: mol_type = genomic RNA
ccaccacttgaaccatcaag

SEQ ID NO: 30991 - RNA, 20 nt, African swine fever virus
  source 1..20: mol_type = genomic RNA
cgcatagggaccatgtactc

SEQ ID NO: 30992 - RNA, 20 nt, African swine fever virus
  source 1..20: mol_type = genomic RNA
tttacggtattgccgcgcct

SEQ ID NO: 30993 - RNA, 20 nt, African swine fever virus
  source 1..20: mol_type = genomic RNA
atttacggtattgccgcgcc

SEQ ID NO: 30994 - RNA, 20 nt, African swine fever virus
  source 1..20: mol_type = genomic RNA
tgaatcccatttacggtatt

SEQ ID NO: 30995 - RNA, 20 nt, African swine fever virus
  source 1..20: mol_type = genomic RNA
tgtcgtctccagttcaggtc

SEQ ID NO: 30996 - RNA, 20 nt, African swine fever virus
  source 1..20: mol_type = genomic RNA
tccaacgtgttgttgcgaat

SEQ ID NO: 30997 - RNA, 20 nt, African swine fever virus
  source 1..20: mol_type = genomic RNA
tcgtcatttactcatgtacg

SEQ ID NO: 30998 - RNA, 20 nt, African swine fever virus
  source 1..20: mol_type = genomic RNA
accatcgtcatttactcatg

SEQ ID NO: 30999 - RNA, 20 nt, African swine fever virus
  source 1..20: mol_type = genomic RNA
aaccatcgtcatttactcat

SEQ ID NO: 31000 - RNA, 20 nt, African swine fever virus
  source 1..20: mol_type = genomic RNA
tcgtgtcgtcctctatagga

SEQ ID NO: 31001 - RNA, 20 nt, African swine fever virus
  source 1..20: mol_type = genomic RNA
tacaccatcgtgtcgtcctc

SEQ ID NO: 31002 - RNA, 20 nt, African swine fever virus
  source 1..20: mol_type = genomic RNA
atacaccatcgtgtcgtcct

SEQ ID NO: 31003 - RNA, 20 nt, African swine fever virus
  source 1..20: mol_type = genomic RNA
ttagacgcagtactaatacc

SEQ ID NO: 31004 - RNA, 20 nt, African swine fever virus
  source 1..20: mol_type = genomic RNA
tcattattcgcatatatcta

SEQ ID NO: 31005 - RNA, 20 nt, African swine fever virus
  source 1..20: mol_type = genomic RNA
gtagaggctgaacaatcctc

SEQ ID NO: 31006 - RNA, 20 nt, African swine fever virus
  source 1..20: mol_type = genomic RNA
caggagatctttagcgcgaa

SEQ ID NO: 31007 - RNA, 20 nt, African swine fever virus
  source 1..20: mol_type = genomic RNA
acaagtcgggaattgtgcgg

SEQ ID NO: 31008 - RNA, 20 nt, African swine fever virus
  source 1..20: mol_type = genomic RNA
accaccggtccgtggccggg

SEQ ID NO: 31009 - RNA, 20 nt, African swine fever virus
  source 1..20: mol_type = genomic RNA
ttgacgcaatatatgctgga

SEQ ID NO: 31010 - RNA, 20 nt, African swine fever virus
  source 1..20: mol_type = genomic RNA
tatcagaacccttgacgcaa

SEQ ID NO: 31011 - RNA, 20 nt, African swine fever virus
  source 1..20: mol_type = genomic RNA
ggcggcgcagtccgtatcag

SEQ ID NO: 31012 - RNA, 20 nt, African swine fever virus
  source 1..20: mol_type = genomic RNA
cataaggctacaatatactc

SEQ ID NO: 31013 - RNA, 20 nt, African swine fever virus
  source 1..20: mol_type = genomic RNA
ggacctcataaggctacaat

SEQ ID NO: 31014 - RNA, 20 nt, African swine fever virus
  source 1..20: mol_type = genomic RNA
gcgagcagatgagtgccatc

SEQ ID NO: 31015 - RNA, 20 nt, African swine fever virus
  source 1..20: mol_type = genomic RNA
tacgtgtttattaacaacat

SEQ ID NO: 31016 - RNA, 20 nt, African swine fever virus
  source 1..20: mol_type = genomic RNA
gtggcgtgcttcccttcgac

SEQ ID NO: 31017 - RNA, 20 nt, African swine fever virus
  source 1..20: mol_type = genomic RNA
tcatgctgtcggaccaggaa

SEQ ID NO: 31018 - RNA, 20 nt, African swine fever virus
  source 1..20: mol_type = genomic RNA
tcgatactcgtcttgtgcag

SEQ ID NO: 31019 - RNA, 20 nt, African swine fever virus
  source 1..20: mol_type = genomic RNA
acgggtttccatcgatactc

SEQ ID NO: 31020 - RNA, 20 nt, African swine fever virus
  source 1..20: mol_type = genomic RNA
gtattgtggattattaccga

SEQ ID NO: 31021 - RNA, 20 nt, African swine fever virus
  source 1..20: mol_type = genomic RNA
acgggttcatctgcaacagc

SEQ ID NO: 31022 - RNA, 20 nt, African swine fever virus
  source 1..20: mol_type = genomic RNA
ggaggcgcaggcctacgggt

SEQ ID NO: 31023 - RNA, 20 nt, African swine fever virus
  source 1..20: mol_type = genomic RNA
tcggcaggaccctggtgtac

SEQ ID NO: 31024 - RNA, 20 nt, African swine fever virus
  source 1..20: mol_type = genomic RNA
atatgattcacatcatggcg

SEQ ID NO: 31025 - RNA, 20 nt, African swine fever virus
  source 1..20: mol_type = genomic RNA
caatatgattcacatcatgg

SEQ ID NO: 31026 - RNA, 20 nt, African swine fever virus
  source 1..20: mol_type = genomic RNA
gacaacgcatgacttctacg

SEQ ID NO: 31027 - RNA, 20 nt, African swine fever virus
  source 1..20: mol_type = genomic RNA
ataggcctgacaacgcatga

SEQ ID NO: 31028 - RNA, 20 nt, African swine fever virus
  source 1..20: mol_type = genomic RNA
cctataggcctgacaacgca

SEQ ID NO: 31029 - RNA, 20 nt, African swine fever virus
  source 1..20: mol_type = genomic RNA
gattcacagtgtccacggcc

SEQ ID NO: 31030 - RNA, 20 nt, African swine fever virus
  source 1..20: mol_type = genomic RNA
gaactacgtgcgcaacgccg

SEQ ID NO: 31031 - RNA, 20 nt, African swine fever virus
  source 1..20: mol_type = genomic RNA
tgaactacgtgcgcaacgcc

SEQ ID NO: 31032 - RNA, 20 nt, African swine fever virus
  source 1..20: mol_type = genomic RNA
gcagctcgccctgaactacg

SEQ ID NO: 31033 - RNA, 20 nt, African swine fever virus
  source 1..20: mol_type = genomic RNA
agcagctcgccctgaactac

SEQ ID NO: 31034 - RNA, 20 nt, African swine fever virus
  source 1..20: mol_type = genomic RNA
tatttcgcgtagatatgggc

SEQ ID NO: 31035 - RNA, 20 nt, African swine fever virus
  source 1..20: mol_type = genomic RNA
gtggaatctatcaccttatt

SEQ ID NO: 31036 - RNA, 20 nt, African swine fever virus
  source 1..20: mol_type = genomic RNA
ccggtggaatctatcacctt

SEQ ID NO: 31037 - RNA, 20 nt, African swine fever virus
  source 1..20: mol_type = genomic RNA
tcggagcgggctcctccggt

SEQ ID NO: 31038 - RNA, 20 nt, African swine fever virus
  source 1..20: mol_type = genomic RNA
acatgcattataacaagcag

SEQ ID NO: 31039 - RNA, 20 nt, African swine fever virus
  source 1..20: mol_type = genomic RNA
tacatgcattataacaagca

SEQ ID NO: 31040 - RNA, 20 nt, African swine fever virus
  source 1..20: mol_type = genomic RNA
catggtactcagaagtgtat

SEQ ID NO: 31041 - RNA, 20 nt, African swine fever virus
  source 1..20: mol_type = genomic RNA
acatggtactcagaagtgta

SEQ ID NO: 31042 - RNA, 20 nt, African swine fever virus
  source 1..20: mol_type = genomic RNA
cacatggtactcagaagtgt

SEQ ID NO: 31043 - RNA, 20 nt, African swine fever virus
  source 1..20: mol_type = genomic RNA
catcaattatcaacgagccc

SEQ ID NO: 31044 - RNA, 20 nt, African swine fever virus
  source 1..20: mol_type = genomic RNA
ccatcaattatcaacgagcc

SEQ ID NO: 31045 - RNA, 20 nt, African swine fever virus
  source 1..20: mol_type = genomic RNA
ttaatgggcaggtgcaggat

SEQ ID NO: 31046 - RNA, 20 nt, African swine fever virus
  source 1..20: mol_type = genomic RNA
cgaagagttcgggtcccgtt

SEQ ID NO: 31047 - RNA, 20 nt, African swine fever virus
  source 1..20: mol_type = genomic RNA
cgttgaggccgaactacttt

SEQ ID NO: 31048 - RNA, 20 nt, African swine fever virus
  source 1..20: mol_type = genomic RNA
ggagcgtcatgagccgcgtt

SEQ ID NO: 31049 - RNA, 20 nt, African swine fever virus
  source 1..20: mol_type = genomic RNA
tggagcgtcatgagccgcgt

SEQ ID NO: 31050 - RNA, 20 nt, African swine fever virus
  source 1..20: mol_type = genomic RNA
ggtataatgcggactttgat

SEQ ID NO: 31051 - RNA, 20 nt, African swine fever virus
  source 1..20: mol_type = genomic RNA
tctctcgaacgaagcagcat

SEQ ID NO: 31052 - RNA, 20 nt, African swine fever virus
  source 1..20: mol_type = genomic RNA
tgatgtcgtcactggcgacg

SEQ ID NO: 31053 - RNA, 20 nt, African swine fever virus
  source 1..20: mol_type = genomic RNA
ttaccgtgatgtcgtcactg

SEQ ID NO: 31054 - RNA, 20 nt, African swine fever virus
  source 1..20: mol_type = genomic RNA
ttcacgatattgagggtctc

SEQ ID NO: 31055 - RNA, 20 nt, African swine fever virus
  source 1..20: mol_type = genomic RNA
ttgcacgaacgctgcaagtt

SEQ ID NO: 31056 - RNA, 20 nt, African swine fever virus
  source 1..20: mol_type = genomic RNA
tttcctttgcacgaacgctg

SEQ ID NO: 31057 - RNA, 20 nt, African swine fever virus
  source 1..20: mol_type = genomic RNA
ggacgaggttggctatccca

SEQ ID NO: 31058 - RNA, 20 nt, African swine fever virus
  source 1..20: mol_type = genomic RNA
tcacctggacgaggttggct

SEQ ID NO: 31059 - RNA, 20 nt, African swine fever virus
  source 1..20: mol_type = genomic RNA
tctgcgggaactcagacctt

SEQ ID NO: 31060 - RNA, 20 nt, African swine fever virus
  source 1..20: mol_type = genomic RNA
ggtatggtcgatcagccggt

SEQ ID NO: 31061 - RNA, 20 nt, African swine fever virus
  source 1..20: mol_type = genomic RNA
actgggcagccaggtatggt

SEQ ID NO: 31062 - RNA, 20 nt, African swine fever virus
  source 1..20: mol_type = genomic RNA
cgcaaggagggaagaattcg

SEQ ID NO: 31063 - RNA, 20 nt, African swine fever virus
  source 1..20: mol_type = genomic RNA
tctatcatgcgaagacttcc

SEQ ID NO: 31064 - RNA, 20 nt, African swine fever virus
  source 1..20: mol_type = genomic RNA
gctccctctatcatgcgaag

SEQ ID NO: 31065 - RNA, 20 nt, African swine fever virus
  source 1..20: mol_type = genomic RNA
cgctccctctatcatgcgaa

SEQ ID NO: 31066 - RNA, 20 nt, African swine fever virus
  source 1..20: mol_type = genomic RNA
tcagcatacgacctggcatc

SEQ ID NO: 31067 - RNA, 20 nt, African swine fever virus
  source 1..20: mol_type = genomic RNA
atcagcatacgacctggcat

SEQ ID NO: 31068 - RNA, 20 nt, African swine fever virus
  source 1..20: mol_type = genomic RNA
ccatcagcatacgacctggc

SEQ ID NO: 31069 - RNA, 20 nt, African swine fever virus
  source 1..20: mol_type = genomic RNA
cccatcagcatacgacctgg

SEQ ID NO: 31070 - RNA, 20 nt, African swine fever virus
  source 1..20: mol_type = genomic RNA
gtgcttcagccgctcttcat

SEQ ID NO: 31071 - RNA, 20 nt, African swine fever virus
  source 1..20: mol_type = genomic RNA
gggatactgcagatgcatgc

SEQ ID NO: 31072 - RNA, 20 nt, African swine fever virus
  source 1..20: mol_type = genomic RNA
tgggatactgcagatgcatg

SEQ ID NO: 31073 - RNA, 20 nt, African swine fever virus
  source 1..20: mol_type = genomic RNA
gcgcaagcaatgtatgggac

SEQ ID NO: 31074 - RNA, 20 nt, African swine fever virus
  source 1..20: mol_type = genomic RNA
ttcagttcaatattgccggt

SEQ ID NO: 31075 - RNA, 20 nt, African swine fever virus
  source 1..20: mol_type = genomic RNA
ccgttcagttcaatattgcc

SEQ ID NO: 31076 - RNA, 20 nt, African swine fever virus
  source 1..20: mol_type = genomic RNA
cttcaggcccgtgcggtagg

SEQ ID NO: 31077 - RNA, 20 nt, African swine fever virus
  source 1..20: mol_type = genomic RNA
aagcatttgacgtacgcgga

SEQ ID NO: 31078 - RNA, 20 nt, African swine fever virus
  source 1..20: mol_type = genomic RNA
ctcagcgcatcttgccaagc

SEQ ID NO: 31079 - RNA, 20 nt, African swine fever virus
  source 1..20: mol_type = genomic RNA
ggatacaacaactaccactc

SEQ ID NO: 31080 - RNA, 20 nt, African swine fever virus
  source 1..20: mol_type = genomic RNA
atgagccgggatacaacaac

SEQ ID NO: 31081 - RNA, 20 nt, African swine fever virus
  source 1..20: mol_type = genomic RNA
atgggccctatgagccggga

SEQ ID NO: 31082 - RNA, 20 nt, African swine fever virus
  source 1..20: mol_type = genomic RNA
tcgtacgcaatgccaatggg

SEQ ID NO: 31083 - RNA, 20 nt, African swine fever virus
  source 1..20: mol_type = genomic RNA
taggcttaaggcgcagttta

SEQ ID NO: 31084 - RNA, 20 nt, African swine fever virus
  source 1..20: mol_type = genomic RNA
ttaggcttaaggcgcagttt

SEQ ID NO: 31085 - RNA, 20 nt, African swine fever virus
  source 1..20: mol_type = genomic RNA
tcgtgcagcgcaagcgcaat

SEQ ID NO: 31086 - RNA, 20 nt, African swine fever virus
  source 1..20: mol_type = genomic RNA
caacggtagtccaccaggca

SEQ ID NO: 31087 - RNA, 20 nt, African swine fever virus
  source 1..20: mol_type = genomic RNA
gcgagaccttacagcccaga

SEQ ID NO: 31088 - RNA, 20 nt, African swine fever virus
  source 1..20: mol_type = genomic RNA
aacgagaacggaggagtcca

SEQ ID NO: 31089 - RNA, 20 nt, African swine fever virus
  source 1..20: mol_type = genomic RNA
ccgttagggattcgggcttt

SEQ ID NO: 31090 - RNA, 20 nt, African swine fever virus
  source 1..20: mol_type = genomic RNA
ggtggtaggctgttagcatt

SEQ ID NO: 31091 - RNA, 20 nt, African swine fever virus
  source 1..20: mol_type = genomic RNA
ctcttaatacgagcaagaag

SEQ ID NO: 31092 - RNA, 20 nt, African swine fever virus
  source 1..20: mol_type = genomic RNA
cttcccgctcttaatacgag

SEQ ID NO: 31093 - RNA, 20 nt, African swine fever virus
  source 1..20: mol_type = genomic RNA
acttcccgctcttaatacga

SEQ ID NO: 31094 - RNA, 20 nt, African swine fever virus
  source 1..20: mol_type = genomic RNA
ttacatagtagccaacgggc

SEQ ID NO: 31095 - RNA, 20 nt, African swine fever virus
  source 1..20: mol_type = genomic RNA
gaatgacggcgatgcctcta

SEQ ID NO: 31096 - RNA, 20 nt, African swine fever virus
  source 1..20: mol_type = genomic RNA
aggctgtatagctggtctgc

SEQ ID NO: 31097 - RNA, 20 nt, African swine fever virus
  source 1..20: mol_type = genomic RNA
gtggtacctaggctgtatag

SEQ ID NO: 31098 - RNA, 20 nt, African swine fever virus
  source 1..20: mol_type = genomic RNA
gttgcgtcaacagattgccc

SEQ ID NO: 31099 - RNA, 20 nt, African swine fever virus
  source 1..20: mol_type = genomic RNA
tgttgcgtcaacagattgcc

SEQ ID NO: 31100 - RNA, 20 nt, African swine fever virus
  source 1..20: mol_type = genomic RNA
ctgttgcgtcaacagattgc

SEQ ID NO: 31101 - RNA, 20 nt, African swine fever virus
  source 1..20: mol_type = genomic RNA
ggacaccaatttagcgctaa

SEQ ID NO: 31102 - RNA, 20 nt, African swine fever virus
  source 1..20: mol_type = genomic RNA
tctgacgtaattaatttctc

SEQ ID NO: 31103 - RNA, 20 nt, African swine fever virus
  source 1..20: mol_type = genomic RNA
agatcgataacccaggattg

SEQ ID NO: 31104 - RNA, 20 nt, African swine fever virus
  source 1..20: mol_type = genomic RNA
attccaagatcgataaccca

SEQ ID NO: 31105 - RNA, 20 nt, African swine fever virus
  source 1..20: mol_type = genomic RNA
gcgtccaggtaacgtcctag

SEQ ID NO: 31106 - RNA, 20 nt, African swine fever virus
  source 1..20: mol_type = genomic RNA
tgcgtccaggtaacgtccta

SEQ ID NO: 31107 - RNA, 20 nt, African swine fever virus
  source 1..20: mol_type = genomic RNA
ctgcgtccaggtaacgtcct

SEQ ID NO: 31108 - RNA, 20 nt, African swine fever virus
  source 1..20: mol_type = genomic RNA
tatcgattccaacaagatgc

SEQ ID NO: 31109 - RNA, 20 nt, African swine fever virus
  source 1..20: mol_type = genomic RNA
cgagcgcggtttggtcctta

SEQ ID NO: 31110 - RNA, 20 nt, African swine fever virus
  source 1..20: mol_type = genomic RNA
tcgcaggctctgcgaggtct

SEQ ID NO: 31111 - RNA, 20 nt, African swine fever virus
  source 1..20: mol_type = genomic RNA
tttcgctgatttccttcgca

SEQ ID NO: 31112 - RNA, 20 nt, African swine fever virus
  source 1..20: mol_type = genomic RNA
cggctgaagaagcttatggc

SEQ ID NO: 31113 - RNA, 20 nt, African swine fever virus
  source 1..20: mol_type = genomic RNA
ccggctgaagaagcttatgg

SEQ ID NO: 31114 - RNA, 20 nt, African swine fever virus
  source 1..20: mol_type = genomic RNA
cccggctgaagaagcttatg

SEQ ID NO: 31115 - RNA, 20 nt, African swine fever virus
  source 1..20: mol_type = genomic RNA
gttctcccaacatggtggta

SEQ ID NO: 31116 - RNA, 20 nt, African swine fever virus
  source 1..20: mol_type = genomic RNA
tgattagcatttatcgagta

SEQ ID NO: 31117 - RNA, 20 nt, African swine fever virus
  source 1..20: mol_type = genomic RNA
aatatgataccacatgcggt

SEQ ID NO: 31118 - RNA, 20 nt, African swine fever virus
  source 1..20: mol_type = genomic RNA
tcggcttacccttaggaatt

SEQ ID NO: 31119 - RNA, 20 nt, African swine fever virus
  source 1..20: mol_type = genomic RNA
acgacttacataacattgca

SEQ ID NO: 31120 - RNA, 20 nt, African swine fever virus
  source 1..20: mol_type = genomic RNA
gaagaacatgttatcctcac

SEQ ID NO: 31121 - RNA, 20 nt, African swine fever virus
  source 1..20: mol_type = genomic RNA
gtgacgacgaacctgaagaa

SEQ ID NO: 31122 - RNA, 20 nt, African swine fever virus
  source 1..20: mol_type = genomic RNA
tgcaggcctatttagacacg

SEQ ID NO: 31123 - RNA, 20 nt, African swine fever virus
  source 1..20: mol_type = genomic RNA
catttaatacgcaaggccat

SEQ ID NO: 31124 - RNA, 20 nt, African swine fever virus
  source 1..20: mol_type = genomic RNA
ttggcgtatcaacaagatca

SEQ ID NO: 31125 - RNA, 20 nt, African swine fever virus
  source 1..20: mol_type = genomic RNA
cgccattggcgtatcaacaa

SEQ ID NO: 31126 - RNA, 20 nt, African swine fever virus
  source 1..20: mol_type = genomic RNA
taagtcctcgccattggcgt

SEQ ID NO: 31127 - RNA, 20 nt, African swine fever virus
  source 1..20: mol_type = genomic RNA
aatctccttaagtcctcgcc

SEQ ID NO: 31128 - RNA, 20 nt, African swine fever virus
  source 1..20: mol_type = genomic RNA
gaatctccttaagtcctcgc

SEQ ID NO: 31129 - RNA, 20 nt, African swine fever virus
  source 1..20: mol_type = genomic RNA
ccgaatctccttaagtcctc

SEQ ID NO: 31130 - RNA, 20 nt, African swine fever virus
  source 1..20: mol_type = genomic RNA
actctataagctcggatgag

SEQ ID NO: 31131 - RNA, 20 nt, African swine fever virus
  source 1..20: mol_type = genomic RNA
gtacagcttgctaacagcag

SEQ ID NO: 31132 - RNA, 20 nt, African swine fever virus
  source 1..20: mol_type = genomic RNA
ttgatttaatagcggccgtt

SEQ ID NO: 31133 - RNA, 20 nt, African swine fever virus
  source 1..20: mol_type = genomic RNA
tgcgacttattacctcgcga

SEQ ID NO: 31134 - RNA, 20 nt, African swine fever virus
  source 1..20: mol_type = genomic RNA
cggaggactccgtgcgactt

SEQ ID NO: 31135 - RNA, 20 nt, African swine fever virus
  source 1..20: mol_type = genomic RNA
cttcatttcactatacgatg

SEQ ID NO: 31136 - RNA, 20 nt, African swine fever virus
  source 1..20: mol_type = genomic RNA
gcttcatttcactatacgat

SEQ ID NO: 31137 - RNA, 20 nt, African swine fever virus
  source 1..20: mol_type = genomic RNA
atggagcaggtactcatcca

SEQ ID NO: 31138 - RNA, 20 nt, African swine fever virus
  source 1..20: mol_type = genomic RNA
aagaaccctttcaagtattg

SEQ ID NO: 31139 - RNA, 20 nt, African swine fever virus
  source 1..20: mol_type = genomic RNA
aatacctcgaacactcgcag

SEQ ID NO: 31140 - RNA, 20 nt, African swine fever virus
  source 1..20: mol_type = genomic RNA
cgatgcacagcatccgtatt

SEQ ID NO: 31141 - RNA, 20 nt, African swine fever virus
  source 1..20: mol_type = genomic RNA
gcgatgcacagcatccgtat

SEQ ID NO: 31142 - RNA, 20 nt, African swine fever virus
  source 1..20: mol_type = genomic RNA
gagcatttgtacgtcgctgc

SEQ ID NO: 31143 - RNA, 20 nt, African swine fever virus
  source 1..20: mol_type = genomic RNA
agctcatacagggaattacc

SEQ ID NO: 31144 - RNA, 20 nt, African swine fever virus
  source 1..20: mol_type = genomic RNA
aagctcatacagggaattac

SEQ ID NO: 31145 - RNA, 20 nt, African swine fever virus
  source 1..20: mol_type = genomic RNA
tgtggacgtactccgagcta

SEQ ID NO: 31146 - RNA, 20 nt, African swine fever virus
  source 1..20: mol_type = genomic RNA
gtgtggacgtactccgagct

SEQ ID NO: 31147 - RNA, 20 nt, African swine fever virus
  source 1..20: mol_type = genomic RNA
cgtgtggacgtactccgagc

SEQ ID NO: 31148 - RNA, 20 nt, African swine fever virus
  source 1..20: mol_type = genomic RNA
ttgaggcctatggatacggg

SEQ ID NO: 31149 - RNA, 20 nt, African swine fever virus
  source 1..20: mol_type = genomic RNA
caatacctttgaggcctatg

SEQ ID NO: 31150 - RNA, 20 nt, African swine fever virus
  source 1..20: mol_type = genomic RNA
ccgtcctcaatacctttgag

SEQ ID NO: 31151 - RNA, 20 nt, African swine fever virus
  source 1..20: mol_type = genomic RNA
tagtccatccatcacgccgg

SEQ ID NO: 31152 - RNA, 20 nt, African swine fever virus
  source 1..20: mol_type = genomic RNA
ttagtccatccatcacgccg

SEQ ID NO: 31153 - RNA, 20 nt, African swine fever virus
  source 1..20: mol_type = genomic RNA
cttagtccatccatcacgcc

SEQ ID NO: 31154 - RNA, 20 nt, African swine fever virus
  source 1..20: mol_type = genomic RNA
ttgatgggttcaccaaccag

SEQ ID NO: 31155 - RNA, 20 nt, African swine fever virus
  source 1..20: mol_type = genomic RNA
gagcttgctaagtacgcaca

SEQ ID NO: 31156 - RNA, 20 nt, African swine fever virus
  source 1..20: mol_type = genomic RNA
gtgagcgcaacgtgacaatc

SEQ ID NO: 31157 - RNA, 20 nt, African swine fever virus
  source 1..20: mol_type = genomic RNA
agtgagcgcaacgtgacaat

SEQ ID NO: 31158 - RNA, 20 nt, African swine fever virus
  source 1..20: mol_type = genomic RNA
cagtgagcgcaacgtgacaa

SEQ ID NO: 31159 - RNA, 20 nt, African swine fever virus
  source 1..20: mol_type = genomic RNA
ccagtgagcgcaacgtgaca

SEQ ID NO: 31160 - RNA, 20 nt, African swine fever virus
  source 1..20: mol_type = genomic RNA
cccagtgagcgcaacgtgac

SEQ ID NO: 31161 - RNA, 20 nt, African swine fever virus
  source 1..20: mol_type = genomic RNA
tgcggtacgagatgattatg

SEQ ID NO: 31162 - RNA, 20 nt, African swine fever virus
  source 1..20: mol_type = genomic RNA
gctgcgtattctcatcgggt

SEQ ID NO: 31163 - RNA, 20 nt, African swine fever virus
  source 1..20: mol_type = genomic RNA
ccagctgcgtattctcatcg

SEQ ID NO: 31164 - RNA, 20 nt, African swine fever virus
  source 1..20: mol_type = genomic RNA
ggaaggccaccagctgcgta

SEQ ID NO: 31165 - RNA, 20 nt, African swine fever virus
  source 1..20: mol_type = genomic RNA
ctgtacgcgaacgaagcctg

SEQ ID NO: 31166 - RNA, 20 nt, African swine fever virus
  source 1..20: mol_type = genomic RNA
gctgtacgcgaacgaagcct

SEQ ID NO: 31167 - RNA, 20 nt, African swine fever virus
  source 1..20: mol_type = genomic RNA
gtacggttcaccattctgca

SEQ ID NO: 31168 - RNA, 20 nt, African swine fever virus
  source 1..20: mol_type = genomic RNA
tcagtttattccagtacggt

SEQ ID NO: 31169 - RNA, 20 nt, African swine fever virus
  source 1..20: mol_type = genomic RNA
cgattcgcgatgagcacaca

SEQ ID NO: 31170 - RNA, 20 nt, African swine fever virus
  source 1..20: mol_type = genomic RNA
tctgcgccgcgattcgcgat

SEQ ID NO: 31171 - RNA, 20 nt, African swine fever virus
  source 1..20: mol_type = genomic RNA
tgtgggaacgacccgctgct

SEQ ID NO: 31172 - RNA, 20 nt, African swine fever virus
  source 1..20: mol_type = genomic RNA
ctgtgggaacgacccgctgc

SEQ ID NO: 31173 - RNA, 20 nt, African swine fever virus
  source 1..20: mol_type = genomic RNA
caatcgggtccgcatgtcgg

SEQ ID NO: 31174 - RNA, 20 nt, African swine fever virus
  source 1..20: mol_type = genomic RNA
acgcacatctcgggattggc

SEQ ID NO: 31175 - RNA, 20 nt, African swine fever virus
  source 1..20: mol_type = genomic RNA
ccaacgcacatctcgggatt

SEQ ID NO: 31176 - RNA, 20 nt, African swine fever virus
  source 1..20: mol_type = genomic RNA
cctttaatgtgagtggcagc

SEQ ID NO: 31177 - RNA, 20 nt, African swine fever virus
  source 1..20: mol_type = genomic RNA
actgccctttctatggcaag

SEQ ID NO: 31178 - RNA, 20 nt, African swine fever virus
  source 1..20: mol_type = genomic RNA
aaggcttacggcctgtttaa

SEQ ID NO: 31179 - RNA, 20 nt, African swine fever virus
  source 1..20: mol_type = genomic RNA
atgtctgagtatcagcttga

SEQ ID NO: 31180 - RNA, 20 nt, African swine fever virus
  source 1..20: mol_type = genomic RNA
catgtctgagtatcagcttg

SEQ ID NO: 31181 - RNA, 20 nt, African swine fever virus
  source 1..20: mol_type = genomic RNA
tacttacatttcatcgaatg

SEQ ID NO: 31182 - RNA, 20 nt, African swine fever virus
  source 1..20: mol_type = genomic RNA
tccagcgccagcaactgttt

SEQ ID NO: 31183 - RNA, 20 nt, African swine fever virus
  source 1..20: mol_type = genomic RNA
ctccagcgccagcaactgtt

SEQ ID NO: 31184 - RNA, 20 nt, African swine fever virus
  source 1..20: mol_type = genomic RNA
cggcatgagctgcccaacgg

SEQ ID NO: 31185 - RNA, 20 nt, African swine fever virus
  source 1..20: mol_type = genomic RNA
tttggttccgcggcatgagc

SEQ ID NO: 31186 - RNA, 20 nt, African swine fever virus
  source 1..20: mol_type = genomic RNA
ggagtgtcatggaatacgtc

SEQ ID NO: 31187 - RNA, 20 nt, African swine fever virus
  source 1..20: mol_type = genomic RNA
gtaaccgggagtgtcatgga

SEQ ID NO: 31188 - RNA, 20 nt, African swine fever virus
  source 1..20: mol_type = genomic RNA
tcttcatgtcggcaacgccc

SEQ ID NO: 31189 - RNA, 20 nt, African swine fever virus
  source 1..20: mol_type = genomic RNA
ccagggccgtcttcatgtcg

SEQ ID NO: 31190 - RNA, 20 nt, African swine fever virus
  source 1..20: mol_type = genomic RNA
cgtcggttgaatcacggcat

SEQ ID NO: 31191 - RNA, 20 nt, African swine fever virus
  source 1..20: mol_type = genomic RNA
attcatgaaccactacatga

SEQ ID NO: 31192 - RNA, 20 nt, African swine fever virus
  source 1..20: mol_type = genomic RNA
ttgcgcgccaattcatgaac

SEQ ID NO: 31193 - RNA, 20 nt, African swine fever virus
  source 1..20: mol_type = genomic RNA
aacacaccctactcgcgtct

SEQ ID NO: 31194 - RNA, 20 nt, African swine fever virus
  source 1..20: mol_type = genomic RNA
tcaagggtctccaattgcat

SEQ ID NO: 31195 - RNA, 20 nt, African swine fever virus
  source 1..20: mol_type = genomic RNA
tccatcaagggtctccaatt

SEQ ID NO: 31196 - RNA, 20 nt, African swine fever virus
  source 1..20: mol_type = genomic RNA
tttccttccatcaagggtct

SEQ ID NO: 31197 - RNA, 20 nt, African swine fever virus
  source 1..20: mol_type = genomic RNA
acgcgtcgccctttccttcc

SEQ ID NO: 31198 - RNA, 20 nt, African swine fever virus
  source 1..20: mol_type = genomic RNA
tacgcgtcgccctttccttc

SEQ ID NO: 31199 - RNA, 20 nt, African swine fever virus
  source 1..20: mol_type = genomic RNA
ctacgcgtcgccctttcctt

SEQ ID NO: 31200 - RNA, 20 nt, African swine fever virus
  source 1..20: mol_type = genomic RNA
aattggatgccgcagacttt

SEQ ID NO: 31201 - RNA, 20 nt, African swine fever virus
  source 1..20: mol_type = genomic RNA
agcgacgaacaattagctga

SEQ ID NO: 31202 - RNA, 20 nt, African swine fever virus
  source 1..20: mol_type = genomic RNA
cattccaagcgacgaacaat

SEQ ID NO: 31203 - RNA, 20 nt, African swine fever virus
  source 1..20: mol_type = genomic RNA
acattccaagcgacgaacaa

SEQ ID NO: 31204 - RNA, 20 nt, African swine fever virus
  source 1..20: mol_type = genomic RNA
tgcagtcccacattccaagc

SEQ ID NO: 31205 - RNA, 20 nt, African swine fever virus
  source 1..20: mol_type = genomic RNA
gtctgttgactgcaagtcga

SEQ ID NO: 31206 - RNA, 20 nt, African swine fever virus
  source 1..20: mol_type = genomic RNA
tcgtttactataaccggtct

SEQ ID NO: 31207 - RNA, 20 nt, African swine fever virus
  source 1..20: mol_type = genomic RNA
gaacaactgcgattcttcta

SEQ ID NO: 31208 - RNA, 20 nt, African swine fever virus
  source 1..20: mol_type = genomic RNA
ggaacaactgcgattcttct

SEQ ID NO: 31209 - RNA, 20 nt, African swine fever virus
  source 1..20: mol_type = genomic RNA
tacgatcgccagatatcccg

SEQ ID NO: 31210 - RNA, 20 nt, African swine fever virus
  source 1..20: mol_type = genomic RNA
atacgatcgccagatatccc

SEQ ID NO: 31211 - RNA, 20 nt, African swine fever virus
  source 1..20: mol_type = genomic RNA
tttagcccatacgatcgcca

SEQ ID NO: 31212 - RNA, 20 nt, African swine fever virus
  source 1..20: mol_type = genomic RNA
gtcaacccgcgagggaatta

SEQ ID NO: 31213 - RNA, 20 nt, African swine fever virus
  source 1..20: mol_type = genomic RNA
acagcaccatcttacgatat

SEQ ID NO: 31214 - RNA, 20 nt, African swine fever virus
  source 1..20: mol_type = genomic RNA
gtattaagtaccatttgaac

SEQ ID NO: 31215 - RNA, 20 nt, African swine fever virus
  source 1..20: mol_type = genomic RNA
tgattcagcgtctccgcgtt

SEQ ID NO: 31216 - RNA, 20 nt, African swine fever virus
  source 1..20: mol_type = genomic RNA
tggtgaacgtacttgccatt

SEQ ID NO: 31217 - RNA, 20 nt, African swine fever virus
  source 1..20: mol_type = genomic RNA
ccgtggtgaacgtacttgcc

SEQ ID NO: 31218 - RNA, 20 nt, African swine fever virus
  source 1..20: mol_type = genomic RNA
ctgctcgacgattatatcta

SEQ ID NO: 31219 - RNA, 20 nt, African swine fever virus
  source 1..20: mol_type = genomic RNA
gctgctcgacgattatatct

SEQ ID NO: 31220 - RNA, 20 nt, African swine fever virus
  source 1..20: mol_type = genomic RNA
tgggaatgttaatgcagaac

SEQ ID NO: 31221 - RNA, 20 nt, African swine fever virus
  source 1..20: mol_type = genomic RNA
gcggctgcagatattcgcga

SEQ ID NO: 31222 - RNA, 20 nt, African swine fever virus
  source 1..20: mol_type = genomic RNA
tctcccatggagacgtatga

SEQ ID NO: 31223 - RNA, 20 nt, African swine fever virus
  source 1..20: mol_type = genomic RNA
cgccatctcccatggagacg

SEQ ID NO: 31224 - RNA, 20 nt, African swine fever virus
  source 1..20: mol_type = genomic RNA
gagtccatgctcccgcttgc

SEQ ID NO: 31225 - RNA, 20 nt, African swine fever virus
  source 1..20: mol_type = genomic RNA
ccagagtccatgctcccgct

SEQ ID NO: 31226 - RNA, 20 nt, African swine fever virus
  source 1..20: mol_type = genomic RNA
atacggatatccaccctcca

SEQ ID NO: 31227 - RNA, 20 nt, African swine fever virus
  source 1..20: mol_type = genomic RNA
atctctatgggcatctacgt

SEQ ID NO: 31228 - RNA, 20 nt, African swine fever virus
  source 1..20: mol_type = genomic RNA
ttcaccgcctatctctatgg

SEQ ID NO: 31229 - RNA, 20 nt, African swine fever virus
  source 1..20: mol_type = genomic RNA
tttcaccgcctatctctatg

SEQ ID NO: 31230 - RNA, 20 nt, African swine fever virus
  source 1..20: mol_type = genomic RNA
tgccctttcaccgcctatct

SEQ ID NO: 31231 - RNA, 20 nt, African swine fever virus
  source 1..20: mol_type = genomic RNA
aacgctgggatacactcaac

SEQ ID NO: 31232 - RNA, 20 nt, African swine fever virus
  source 1..20: mol_type = genomic RNA
ccgtcataggtgacaatatt

SEQ ID NO: 31233 - RNA, 20 nt, African swine fever virus
  source 1..20: mol_type = genomic RNA
aaccaccgtcataggtgaca

SEQ ID NO: 31234 - RNA, 20 nt, African swine fever virus
  source 1..20: mol_type = genomic RNA
ggcatgctattcgtcgcact

SEQ ID NO: 31235 - RNA, 20 nt, African swine fever virus
  source 1..20: mol_type = genomic RNA
atgcctggcatgctattcgt

SEQ ID NO: 31236 - RNA, 20 nt, African swine fever virus
  source 1..20: mol_type = genomic RNA
tcttgaagatctggcacaca

SEQ ID NO: 31237 - RNA, 20 nt, African swine fever virus
  source 1..20: mol_type = genomic RNA
aggatatcgtcgtcagcatt

SEQ ID NO: 31238 - RNA, 20 nt, African swine fever virus
  source 1..20: mol_type = genomic RNA
gaggatatcgtcgtcagcat

SEQ ID NO: 31239 - RNA, 20 nt, African swine fever virus
  source 1..20: mol_type = genomic RNA
cactgcgaatacatcatgcc

SEQ ID NO: 31240 - RNA, 20 nt, African swine fever virus
  source 1..20: mol_type = genomic RNA
aatcgcaaccgagtgtctct

SEQ ID NO: 31241 - RNA, 20 nt, African swine fever virus
  source 1..20: mol_type = genomic RNA
tttgttgcgcataggccttc

SEQ ID NO: 31242 - RNA, 20 nt, African swine fever virus
  source 1..20: mol_type = genomic RNA
ctgcagcgtttcatcgatat

SEQ ID NO: 31243 - RNA, 20 nt, African swine fever virus
  source 1..20: mol_type = genomic RNA
acctctgcagcgtttcatcg

SEQ ID NO: 31244 - RNA, 20 nt, African swine fever virus
  source 1..20: mol_type = genomic RNA
aaggtgttacaaggacgctt

SEQ ID NO: 31245 - RNA, 20 nt, African swine fever virus
  source 1..20: mol_type = genomic RNA
tccagcgaataacgggacct

SEQ ID NO: 31246 - RNA, 20 nt, African swine fever virus
  source 1..20: mol_type = genomic RNA
ttccatccagcgaataacgg

SEQ ID NO: 31247 - RNA, 20 nt, African swine fever virus
  source 1..20: mol_type = genomic RNA
gttccatccagcgaataacg

SEQ ID NO: 31248 - RNA, 20 nt, African swine fever virus
  source 1..20: mol_type = genomic RNA
cactcggtctgcgaccgctg

SEQ ID NO: 31249 - RNA, 20 nt, African swine fever virus
  source 1..20: mol_type = genomic RNA
tggcatttacgatgagctcg

SEQ ID NO: 31250 - RNA, 20 nt, African swine fever virus
  source 1..20: mol_type = genomic RNA
cgggaacatacacatcgcgc

SEQ ID NO: 31251 - RNA, 20 nt, African swine fever virus
  source 1..20: mol_type = genomic RNA
cctcgggaacatacacatcg

SEQ ID NO: 31252 - RNA, 20 nt, African swine fever virus
  source 1..20: mol_type = genomic RNA
tattgatgttcgttccggct

SEQ ID NO: 31253 - RNA, 20 nt, African swine fever virus
  source 1..20: mol_type = genomic RNA
tggcgagcttcagcccgacg

SEQ ID NO: 31254 - RNA, 20 nt, African swine fever virus
  source 1..20: mol_type = genomic RNA
ctgcgaatgcaccatggcga

SEQ ID NO: 31255 - RNA, 20 nt, African swine fever virus
  source 1..20: mol_type = genomic RNA
actgcgaatgcaccatggcg

SEQ ID NO: 31256 - RNA, 20 nt, African swine fever virus
  source 1..20: mol_type = genomic RNA
tcggcggtggtaagaatggc

SEQ ID NO: 31257 - RNA, 20 nt, African swine fever virus
  source 1..20: mol_type = genomic RNA
ggagggtgtaatggtaggag

SEQ ID NO: 31258 - RNA, 20 nt, African swine fever virus
  source 1..20: mol_type = genomic RNA
ggtatacgggcatgagctcg

SEQ ID NO: 31259 - RNA, 20 nt, African swine fever virus
  source 1..20: mol_type = genomic RNA
tagttcctggtatacgggca

SEQ ID NO: 31260 - RNA, 20 nt, African swine fever virus
  source 1..20: mol_type = genomic RNA
cgcattggcaggcgcgaaga

SEQ ID NO: 31261 - RNA, 20 nt, African swine fever virus
  source 1..20: mol_type = genomic RNA
cgtaggccgcgcattggcag

SEQ ID NO: 31262 - RNA, 20 nt, African swine fever virus
  source 1..20: mol_type = genomic RNA
acgtaggccgcgcattggca

SEQ ID NO: 31263 - RNA, 20 nt, African swine fever virus
  source 1..20: mol_type = genomic RNA
tttcccacgtaggccgcgca

SEQ ID NO: 31264 - RNA, 20 nt, African swine fever virus
  source 1..20: mol_type = genomic RNA
tgcggcaaggcttatcattg

SEQ ID NO: 31265 - RNA, 20 nt, African swine fever virus
  source 1..20: mol_type = genomic RNA
gtgcggcaaggcttatcatt

SEQ ID NO: 31266 - RNA, 20 nt, African swine fever virus
  source 1..20: mol_type = genomic RNA
tatgtatcgtgctattaggc

SEQ ID NO: 31267 - RNA, 20 nt, African swine fever virus
  source 1..20: mol_type = genomic RNA
taatggtcgccgtatgtatc

SEQ ID NO: 31268 - RNA, 20 nt, African swine fever virus
  source 1..20: mol_type = genomic RNA
gcagagggtgcaggctatag

SEQ ID NO: 31269 - RNA, 20 nt, African swine fever virus
  source 1..20: mol_type = genomic RNA
ttgataatggacacgtgttc

SEQ ID NO: 31270 - RNA, 20 nt, African swine fever virus
  source 1..20: mol_type = genomic RNA
cgttgataatggacacgtgt

SEQ ID NO: 31271 - RNA, 20 nt, African swine fever virus
  source 1..20: mol_type = genomic RNA
ggaatggaacccactataac

SEQ ID NO: 31272 - RNA, 20 nt, African swine fever virus
  source 1..20: mol_type = genomic RNA
ctggccggtccattctatgc

SEQ ID NO: 31273 - RNA, 20 nt, African swine fever virus
  source 1..20: mol_type = genomic RNA
tccgctggccggtccattct

SEQ ID NO: 31274 - RNA, 20 nt, African swine fever virus
  source 1..20: mol_type = genomic RNA
cattgcgggcacgcgtatat

SEQ ID NO: 31275 - RNA, 20 nt, African swine fever virus
  source 1..20: mol_type = genomic RNA
gcattgcgggcacgcgtata

SEQ ID NO: 31276 - RNA, 20 nt, African swine fever virus
  source 1..20: mol_type = genomic RNA
cccgcattgcgggcacgcgt

SEQ ID NO: 31277 - RNA, 20 nt, African swine fever virus
  source 1..20: mol_type = genomic RNA
tcccgcattgcgggcacgcg

SEQ ID NO: 31278 - RNA, 20 nt, African swine fever virus
  source 1..20: mol_type = genomic RNA
ccgcgagtagcatgcagtcc

SEQ ID NO: 31279 - RNA, 20 nt, African swine fever virus
  source 1..20: mol_type = genomic RNA
tccgccgcgagtagcatgca

SEQ ID NO: 31280 - RNA, 20 nt, African swine fever virus
  source 1..20: mol_type = genomic RNA
ttccgccgcgagtagcatgc

SEQ ID NO: 31281 - RNA, 20 nt, African swine fever virus
  source 1..20: mol_type = genomic RNA
cttccgccgcgagtagcatg

SEQ ID NO: 31282 - RNA, 20 nt, African swine fever virus
  source 1..20: mol_type = genomic RNA
agggtcagtcccgtgcgcaa

SEQ ID NO: 31283 - RNA, 20 nt, African swine fever virus
  source 1..20: mol_type = genomic RNA
gggagatcatgccgcagaag

SEQ ID NO: 31284 - RNA, 20 nt, African swine fever virus
  source 1..20: mol_type = genomic RNA
cccagggagatcatgccgca

SEQ ID NO: 31285 - RNA, 20 nt, African swine fever virus
  source 1..20: mol_type = genomic RNA
tcccagggagatcatgccgc

SEQ ID NO: 31286 - RNA, 20 nt, African swine fever virus
  source 1..20: mol_type = genomic RNA
gagtccgttgtaatgtttgt

SEQ ID NO: 31287 - RNA, 20 nt, African swine fever virus
  source 1..20: mol_type = genomic RNA
atacctgcacaattccctgc

SEQ ID NO: 31288 - RNA, 20 nt, African swine fever virus
  source 1..20: mol_type = genomic RNA
gatcttgatcaacgcacgca

SEQ ID NO: 31289 - RNA, 20 nt, African swine fever virus
  source 1..20: mol_type = genomic RNA
atccagatcttgatcaacgc

SEQ ID NO: 31290 - RNA, 20 nt, African swine fever virus
  source 1..20: mol_type = genomic RNA
tttcgtacacacgtatcagc

SEQ ID NO: 31291 - RNA, 20 nt, African swine fever virus
  source 1..20: mol_type = genomic RNA
ttgccgagtcatccagggta

SEQ ID NO: 31292 - RNA, 20 nt, African swine fever virus
  source 1..20: mol_type = genomic RNA
ctcgatggcatccagcttgt

SEQ ID NO: 31293 - RNA, 20 nt, African swine fever virus
  source 1..20: mol_type = genomic RNA
tctaagaagttgggaatctg

SEQ ID NO: 31294 - RNA, 20 nt, African swine fever virus
  source 1..20: mol_type = genomic RNA
cgtcattccgtctaagaagt

SEQ ID NO: 31295 - RNA, 20 nt, African swine fever virus
  source 1..20: mol_type = genomic RNA
gcgtcattccgtctaagaag

SEQ ID NO: 31296 - RNA, 20 nt, African swine fever virus
  source 1..20: mol_type = genomic RNA
ttcgttcacggttgttggaa

SEQ ID NO: 31297 - RNA, 20 nt, African swine fever virus
  source 1..20: mol_type = genomic RNA
gggtaatactgggcggcttt

SEQ ID NO: 31298 - RNA, 20 nt, African swine fever virus
  source 1..20: mol_type = genomic RNA
aagcttcctatgcctatgaa

SEQ ID NO: 31299 - RNA, 20 nt, African swine fever virus
  source 1..20: mol_type = genomic RNA
ggagccgaagcttcctatgc

SEQ ID NO: 31300 - RNA, 20 nt, African swine fever virus
  source 1..20: mol_type = genomic RNA
taatagcaagcggcaataca

SEQ ID NO: 31301 - RNA, 20 nt, African swine fever virus
  source 1..20: mol_type = genomic RNA
atgggttggcgccgtactcc

SEQ ID NO: 31302 - RNA, 20 nt, African swine fever virus
  source 1..20: mol_type = genomic RNA
ccgatgggttggcgccgtac

SEQ ID NO: 31303 - RNA, 20 nt, African swine fever virus
  source 1..20: mol_type = genomic RNA
tccgatgggttggcgccgta

SEQ ID NO: 31304 - RNA, 20 nt, African swine fever virus
  source 1..20: mol_type = genomic RNA
aagtggtgtacttccagccc

SEQ ID NO: 31305 - RNA, 20 nt, African swine fever virus
  source 1..20: mol_type = genomic RNA
gttgccgggcccaagtggtg

SEQ ID NO: 31306 - RNA, 20 nt, African swine fever virus
  source 1..20: mol_type = genomic RNA
cagcgggagtatagtaatct

SEQ ID NO: 31307 - RNA, 20 nt, African swine fever virus
  source 1..20: mol_type = genomic RNA
tagctgtagtagtattggcc

SEQ ID NO: 31308 - RNA, 20 nt, African swine fever virus
  source 1..20: mol_type = genomic RNA
cgatacggttgagactattt

SEQ ID NO: 31309 - RNA, 20 nt, African swine fever virus
  source 1..20: mol_type = genomic RNA
gtaaggtagccacgcatata

SEQ ID NO: 31310 - RNA, 20 nt, African swine fever virus
  source 1..20: mol_type = genomic RNA
tgataatgcgcagcttaagc

SEQ ID NO: 31311 - RNA, 20 nt, African swine fever virus
  source 1..20: mol_type = genomic RNA
tgctcgcttagaatgcggct

SEQ ID NO: 31312 - RNA, 20 nt, African swine fever virus
  source 1..20: mol_type = genomic RNA
tatcaagacgagcttgcatt

SEQ ID NO: 31313 - RNA, 20 nt, African swine fever virus
  source 1..20: mol_type = genomic RNA
gccatacgctggcgccggga

SEQ ID NO: 31314 - RNA, 20 nt, African swine fever virus
  source 1..20: mol_type = genomic RNA
catcaatttcctccagccat

SEQ ID NO: 31315 - RNA, 20 nt, African swine fever virus
  source 1..20: mol_type = genomic RNA
tttccaccgcatcaatttcc

SEQ ID NO: 31316 - RNA, 20 nt, African swine fever virus
  source 1..20: mol_type = genomic RNA
cacaagaagatttgataact

SEQ ID NO: 31317 - RNA, 20 nt, African swine fever virus
  source 1..20: mol_type = genomic RNA
gccggatcattattggccga

SEQ ID NO: 31318 - RNA, 20 nt, African swine fever virus
  source 1..20: mol_type = genomic RNA
catatcaatcaggccgttcg

SEQ ID NO: 31319 - RNA, 20 nt, African swine fever virus
  source 1..20: mol_type = genomic RNA
gcggtgccgctgccacatat

SEQ ID NO: 31320 - RNA, 20 nt, African swine fever virus
  source 1..20: mol_type = genomic RNA
cagacccgcgtcaccaccgc

SEQ ID NO: 31321 - RNA, 20 nt, African swine fever virus
  source 1..20: mol_type = genomic RNA
cgatattgagcagtacccaa

SEQ ID NO: 31322 - RNA, 20 nt, African swine fever virus
  source 1..20: mol_type = genomic RNA
cctcgatattgagcagtacc

SEQ ID NO: 31323 - RNA, 20 nt, African swine fever virus
  source 1..20: mol_type = genomic RNA
acctcgatattgagcagtac

SEQ ID NO: 31324 - RNA, 20 nt, African swine fever virus
  source 1..20: mol_type = genomic RNA
cgatctcattcaggtggcag

SEQ ID NO: 31325 - RNA, 20 nt, African swine fever virus
  source 1..20: mol_type = genomic RNA
tctatagccgcgatctcatt

SEQ ID NO: 31326 - RNA, 20 nt, African swine fever virus
  source 1..20: mol_type = genomic RNA
gtttatgacggaacaattta

SEQ ID NO: 31327 - RNA, 20 nt, African swine fever virus
  source 1..20: mol_type = genomic RNA
cggacctgtttatgacggaa

SEQ ID NO: 31328 - RNA, 20 nt, African swine fever virus
  source 1..20: mol_type = genomic RNA
gtgggtataagatcgaggat

SEQ ID NO: 31329 - RNA, 20 nt, African swine fever virus
  source 1..20: mol_type = genomic RNA
ggtgggtataagatcgagga

SEQ ID NO: 31330 - RNA, 20 nt, African swine fever virus
  source 1..20: mol_type = genomic RNA
gtcgcgggtcttgcaagatg

SEQ ID NO: 31331 - RNA, 20 nt, African swine fever virus
  source 1..20: mol_type = genomic RNA
cggtgcacggcctgtcgcgg

SEQ ID NO: 31332 - RNA, 20 nt, African swine fever virus
  source 1..20: mol_type = genomic RNA
gtcaatgttgttatggactt

SEQ ID NO: 31333 - RNA, 20 nt, African swine fever virus
  source 1..20: mol_type = genomic RNA
tcgtcccagtcaatgttgtt

SEQ ID NO: 31334 - RNA, 20 nt, African swine fever virus
  source 1..20: mol_type = genomic RNA
ctcgtcccagtcaatgttgt

SEQ ID NO: 31335 - RNA, 20 nt, African swine fever virus
  source 1..20: mol_type = genomic RNA
tagcacatctatggattcct

SEQ ID NO: 31336 - RNA, 20 nt, African swine fever virus
  source 1..20: mol_type = genomic RNA
cccacaacggtacatacttt

SEQ ID NO: 31337 - RNA, 20 nt, African swine fever virus
  source 1..20: mol_type = genomic RNA
gcccacaacggtacatactt

SEQ ID NO: 31338 - RNA, 20 nt, African swine fever virus
  source 1..20: mol_type = genomic RNA
ataggtgggtttgctcccgc

SEQ ID NO: 31339 - RNA, 20 nt, African swine fever virus
  source 1..20: mol_type = genomic RNA
tctaatgtggtgataccaat

SEQ ID NO: 31340 - RNA, 20 nt, African swine fever virus
  source 1..20: mol_type = genomic RNA
atcatactcatcggcatgga

SEQ ID NO: 31341 - RNA, 20 nt, African swine fever virus
  source 1..20: mol_type = genomic RNA
gtactgttctaattcgtctt

SEQ ID NO: 31342 - RNA, 20 nt, African swine fever virus
  source 1..20: mol_type = genomic RNA
taatgatggttgggttgtag

SEQ ID NO: 31343 - RNA, 20 nt, African swine fever virus
  source 1..20: mol_type = genomic RNA
gtgatatgtctttaatgtac

SEQ ID NO: 31344 - RNA, 20 nt, African swine fever virus
  source 1..20: mol_type = genomic RNA
tcgtttgatgcctggtggcg

SEQ ID NO: 31345 - RNA, 20 nt, African swine fever virus
  source 1..20: mol_type = genomic RNA
gccactggtagggaatatgt

SEQ ID NO: 31346 - RNA, 20 nt, African swine fever virus
  source 1..20: mol_type = genomic RNA
gcgagaacgggctcgctatg

SEQ ID NO: 31347 - RNA, 20 nt, African swine fever virus
  source 1..20: mol_type = genomic RNA
cgtatgaagatattcaagat

SEQ ID NO: 31348 - RNA, 20 nt, African swine fever virus
  source 1..20: mol_type = genomic RNA
ttatatcaagcccgtgttgt

SEQ ID NO: 31349 - RNA, 20 nt, African swine fever virus
  source 1..20: mol_type = genomic RNA
cctttatatcaagcccgtgt

SEQ ID NO: 31350 - RNA, 20 nt, African swine fever virus
  source 1..20: mol_type = genomic RNA
taggaggtctatctccttga

SEQ ID NO: 31351 - RNA, 20 nt, African swine fever virus
  source 1..20: mol_type = genomic RNA
tcgggagggatagggaataa

SEQ ID NO: 31352 - RNA, 20 nt, African swine fever virus
  source 1..20: mol_type = genomic RNA
acaatctgggtatctgtatc

SEQ ID NO: 31353 - RNA, 20 nt, African swine fever virus
  source 1..20: mol_type = genomic RNA
cacaatctgggtatctgtat

SEQ ID NO: 31354 - RNA, 20 nt, African swine fever virus
  source 1..20: mol_type = genomic RNA
ttagggttaggacgatgcag

SEQ ID NO: 31355 - RNA, 20 nt, African swine fever virus
  source 1..20: mol_type = genomic RNA
atacttagacgcaccataag

SEQ ID NO: 31356 - RNA, 20 nt, African swine fever virus
  source 1..20: mol_type = genomic RNA
cagtatcttaacgggctgtt

SEQ ID NO: 31357 - RNA, 20 nt, African swine fever virus
  source 1..20: mol_type = genomic RNA
cggcagtgccgtgaaggtcg

SEQ ID NO: 31358 - RNA, 20 nt, African swine fever virus
  source 1..20: mol_type = genomic RNA
ccagaggaatgccctcggca

SEQ ID NO: 31359 - RNA, 20 nt, African swine fever virus
  source 1..20: mol_type = genomic RNA
tccagaggaatgccctcggc

SEQ ID NO: 31360 - RNA, 20 nt, African swine fever virus
  source 1..20: mol_type = genomic RNA
aggcagcgtatatttaattt

SEQ ID NO: 31361 - RNA, 20 nt, African swine fever virus
  source 1..20: mol_type = genomic RNA
ctaggcagcgtatatttaat

SEQ ID NO: 31362 - RNA, 20 nt, African swine fever virus
  source 1..20: mol_type = genomic RNA
tctttggcgcggctcttgtt

SEQ ID NO: 31363 - RNA, 20 nt, African swine fever virus
  source 1..20: mol_type = genomic RNA
gggagtctagcaggcagtat

SEQ ID NO: 31364 - RNA, 20 nt, African swine fever virus
  source 1..20: mol_type = genomic RNA
gtttgcccataaggctttaa

SEQ ID NO: 31365 - RNA, 20 nt, African swine fever virus
  source 1..20: mol_type = genomic RNA
atgatatttgcgcctgtttg

SEQ ID NO: 31366 - RNA, 20 nt, African swine fever virus
  source 1..20: mol_type = genomic RNA
gtactcctatgatatttgcg

SEQ ID NO: 31367 - RNA, 20 nt, African swine fever virus
  source 1..20: mol_type = genomic RNA
tgaactcgaagtggtattgc

SEQ ID NO: 31368 - RNA, 20 nt, African swine fever virus
  source 1..20: mol_type = genomic RNA
atttcggaactaggagtaga

SEQ ID NO: 31369 - RNA, 20 nt, African swine fever virus
  source 1..20: mol_type = genomic RNA
ttaagagtcttgtatcacat

SEQ ID NO: 31370 - RNA, 20 nt, African swine fever virus
  source 1..20: mol_type = genomic RNA
ttaactgtgtggacgatagg

SEQ ID NO: 31371 - RNA, 20 nt, African swine fever virus
  source 1..20: mol_type = genomic RNA
aatagtgttgatctacttca

SEQ ID NO: 31372 - RNA, 20 nt, African swine fever virus
  source 1..20: mol_type = genomic RNA
gtgttattaagcttatcgaa

SEQ ID NO: 31373 - RNA, 20 nt, African swine fever virus
  source 1..20: mol_type = genomic RNA
gcaagatactcccggtgtta

SEQ ID NO: 31374 - RNA, 20 nt, African swine fever virus
  source 1..20: mol_type = genomic RNA
tgcaagatactcccggtgtt

SEQ ID NO: 31375 - RNA, 20 nt, African swine fever virus
  source 1..20: mol_type = genomic RNA
caacgcagcacatgtatttc

SEQ ID NO: 31376 - RNA, 20 nt, African swine fever virus
  source 1..20: mol_type = genomic RNA
cccaggcacaatatgcgttt

SEQ ID NO: 31377 - RNA, 20 nt, African swine fever virus
  source 1..20: mol_type = genomic RNA
atagcatatcctacgagggc

SEQ ID NO: 31378 - RNA, 20 nt, African swine fever virus
  source 1..20: mol_type = genomic RNA
atccctgccaaccgcttgta

SEQ ID NO: 31379 - RNA, 20 nt, African swine fever virus
  source 1..20: mol_type = genomic RNA
ttgaatgtgccttcaacggc

SEQ ID NO: 31380 - RNA, 20 nt, African swine fever virus
  source 1..20: mol_type = genomic RNA
cgatgcgctaccgcccgagg

SEQ ID NO: 31381 - RNA, 20 nt, African swine fever virus
  source 1..20: mol_type = genomic RNA
agaggatcaagtgaaggcgc

SEQ ID NO: 31382 - RNA, 20 nt, African swine fever virus
  source 1..20: mol_type = genomic RNA
tactgggataaggcccgaga

SEQ ID NO: 31383 - RNA, 20 nt, African swine fever virus
  source 1..20: mol_type = genomic RNA
agagccgtactgggataagg

SEQ ID NO: 31384 - RNA, 20 nt, African swine fever virus
  source 1..20: mol_type = genomic RNA
gcaggtttggaattcgccgc

SEQ ID NO: 31385 - RNA, 20 nt, African swine fever virus
  source 1..20: mol_type = genomic RNA
tacgttagtcctgtcctcca

SEQ ID NO: 31386 - RNA, 20 nt, African swine fever virus
  source 1..20: mol_type = genomic RNA
atacgttagtcctgtcctcc

SEQ ID NO: 31387 - RNA, 20 nt, African swine fever virus
  source 1..20: mol_type = genomic RNA
aagatgggccgacccatacg

SEQ ID NO: 31388 - RNA, 20 nt, African swine fever virus
  source 1..20: mol_type = genomic RNA
tatgatcagcatcttcgcgt

SEQ ID NO: 31389 - RNA, 20 nt, African swine fever virus
  source 1..20: mol_type = genomic RNA
gtatgatcagcatcttcgcg

SEQ ID NO: 31390 - RNA, 20 nt, African swine fever virus
  source 1..20: mol_type = genomic RNA
actatgtgcgttcccgtatg

SEQ ID NO: 31391 - RNA, 20 nt, African swine fever virus
  source 1..20: mol_type = genomic RNA
cctactatgtgcgttcccgt

SEQ ID NO: 31392 - RNA, 20 nt, African swine fever virus
  source 1..20: mol_type = genomic RNA
gccaggatcggagcaagagt

SEQ ID NO: 31393 - RNA, 20 nt, African swine fever virus
  source 1..20: mol_type = genomic RNA
gaatgagctcaacaagctat

SEQ ID NO: 31394 - RNA, 20 nt, African swine fever virus
  source 1..20: mol_type = genomic RNA
agtgggtatgataagctacg

SEQ ID NO: 31395 - RNA, 20 nt, African swine fever virus
  source 1..20: mol_type = genomic RNA
cctagtgggtatgataagct

SEQ ID NO: 31396 - RNA, 20 nt, African swine fever virus
  source 1..20: mol_type = genomic RNA
gctgtacaataatattatgc

SEQ ID NO: 31397 - RNA, 20 nt, African swine fever virus
  source 1..20: mol_type = genomic RNA
attctgatcgcacccaagtc

SEQ ID NO: 31398 - RNA, 20 nt, African swine fever virus
  source 1..20: mol_type = genomic RNA
gtcgcttgccatctcacttt

SEQ ID NO: 31399 - RNA, 20 nt, African swine fever virus
  source 1..20: mol_type = genomic RNA
tataacgagtcatgtcttgc

SEQ ID NO: 31400 - RNA, 20 nt, African swine fever virus
  source 1..20: mol_type = genomic RNA
ggtctacgacaggcaccgga

SEQ ID NO: 31401 - RNA, 20 nt, African swine fever virus
  source 1..20: mol_type = genomic RNA
ctttctagccaggtctacga

SEQ ID NO: 31402 - RNA, 20 nt, African swine fever virus
  source 1..20: mol_type = genomic RNA
gctttctagccaggtctacg

SEQ ID NO: 31403 - RNA, 20 nt, African swine fever virus
  source 1..20: mol_type = genomic RNA
atggctacgggcgtagaggc

SEQ ID NO: 31404 - RNA, 20 nt, African swine fever virus
  source 1..20: mol_type = genomic RNA
atgagccgtatggcatcatc

SEQ ID NO: 31405 - RNA, 20 nt, African swine fever virus
  source 1..20: mol_type = genomic RNA
tgcataccgctgagcctcac

SEQ ID NO: 31406 - RNA, 20 nt, African swine fever virus
  source 1..20: mol_type = genomic RNA
tcgcgtatacaacttgtcgt

SEQ ID NO: 31407 - RNA, 20 nt, African swine fever virus
  source 1..20: mol_type = genomic RNA
tttccgggtacgtgagggaa

SEQ ID NO: 31408 - RNA, 20 nt, African swine fever virus
  source 1..20: mol_type = genomic RNA
gaggactgtaagtcccacca

SEQ ID NO: 31409 - RNA, 20 nt, African swine fever virus
  source 1..20: mol_type = genomic RNA
gcccgatggtatggacaaga

SEQ ID NO: 31410 - RNA, 20 nt, African swine fever virus
  source 1..20: mol_type = genomic RNA
ggaccggcccgatggtatgg

SEQ ID NO: 31411 - RNA, 20 nt, African swine fever virus
  source 1..20: mol_type = genomic RNA
tggaccggcccgatggtatg

SEQ ID NO: 31412 - RNA, 20 nt, African swine fever virus
  source 1..20: mol_type = genomic RNA
ctggaccggcccgatggtat

SEQ ID NO: 31413 - RNA, 20 nt, African swine fever virus
  source 1..20: mol_type = genomic RNA
ttggtctagtcgtgttagat

SEQ ID NO: 31414 - RNA, 20 nt, African swine fever virus
  source 1..20: mol_type = genomic RNA
tttggtctagtcgtgttaga

SEQ ID NO: 31415 - RNA, 20 nt, African swine fever virus
  source 1..20: mol_type = genomic RNA
gcgcaagaagcctgagcagt

SEQ ID NO: 31416 - RNA, 20 nt, African swine fever virus
  source 1..20: mol_type = genomic RNA
acgtgtagctgcttacaata

SEQ ID NO: 31417 - RNA, 20 nt, African swine fever virus
  source 1..20: mol_type = genomic RNA
acctacgtgtagctgcttac

SEQ ID NO: 31418 - RNA, 20 nt, African swine fever virus
  source 1..20: mol_type = genomic RNA
cacctacgtgtagctgctta

SEQ ID NO: 31419 - RNA, 20 nt, African swine fever virus
  source 1..20: mol_type = genomic RNA
accctggtcatcgtgcccac

SEQ ID NO: 31420 - RNA, 20 nt, African swine fever virus
  source 1..20: mol_type = genomic RNA
taccctggtcatcgtgccca

SEQ ID NO: 31421 - RNA, 20 nt, African swine fever virus
  source 1..20: mol_type = genomic RNA
gtgtcgctgcgggccctccc

SEQ ID NO: 31422 - RNA, 20 nt, African swine fever virus
  source 1..20: mol_type = genomic RNA
cgtgtcgctgcgggccctcc

SEQ ID NO: 31423 - RNA, 20 nt, African swine fever virus
  source 1..20: mol_type = genomic RNA
ttacggcgcgggcattgcct

SEQ ID NO: 31424 - RNA, 20 nt, African swine fever virus
  source 1..20: mol_type = genomic RNA
tcttaaggcgctcaccgtta

SEQ ID NO: 31425 - RNA, 20 nt, African swine fever virus
  source 1..20: mol_type = genomic RNA
tccagtgcgagaatggaggc

SEQ ID NO: 31426 - RNA, 20 nt, African swine fever virus
  source 1..20: mol_type = genomic RNA
gtccagtgcgagaatggagg

SEQ ID NO: 31427 - RNA, 20 nt, African swine fever virus
  source 1..20: mol_type = genomic RNA
ctgcatatagcccgtccagt

SEQ ID NO: 31428 - RNA, 20 nt, African swine fever virus
  source 1..20: mol_type = genomic RNA
ctcgtaacgcctctggtaag

SEQ ID NO: 31429 - RNA, 20 nt, African swine fever virus
  source 1..20: mol_type = genomic RNA
tctcgtaacgcctctggtaa

SEQ ID NO: 31430 - RNA, 20 nt, African swine fever virus
  source 1..20: mol_type = genomic RNA
tcacacattcggtgacgcta

SEQ ID NO: 31431 - RNA, 20 nt, African swine fever virus
  source 1..20: mol_type = genomic RNA
agaagccgtagagactattt

SEQ ID NO: 31432 - RNA, 20 nt, African swine fever virus
  source 1..20: mol_type = genomic RNA
ggtatattagggcttccgcc

SEQ ID NO: 31433 - RNA, 20 nt, African swine fever virus
  source 1..20: mol_type = genomic RNA
ttgctgggttagcgttctat

SEQ ID NO: 31434 - RNA, 20 nt, African swine fever virus
  source 1..20: mol_type = genomic RNA
atgggtagatacacatgctg

SEQ ID NO: 31435 - RNA, 20 nt, African swine fever virus
  source 1..20: mol_type = genomic RNA
tatgggtagatacacatgct

SEQ ID NO: 31436 - RNA, 20 nt, African swine fever virus
  source 1..20: mol_type = genomic RNA
cctatgggtagatacacatg

SEQ ID NO: 31437 - RNA, 20 nt, African swine fever virus
  source 1..20: mol_type = genomic RNA
ccctatgggtagatacacat

SEQ ID NO: 31438 - RNA, 20 nt, African swine fever virus
  source 1..20: mol_type = genomic RNA
ggagttccttcgggccttca

SEQ ID NO: 31439 - RNA, 20 nt, African swine fever virus
  source 1..20: mol_type = genomic RNA
cgaggagtgatggtatctaa

SEQ ID NO: 31440 - RNA, 20 nt, African swine fever virus
  source 1..20: mol_type = genomic RNA
tatggtcgcagataacctgt

SEQ ID NO: 31441 - RNA, 20 nt, African swine fever virus
  source 1..20: mol_type = genomic RNA
tatgtattctcacctgttta

SEQ ID NO: 31442 - RNA, 20 nt, African swine fever virus
  source 1..20: mol_type = genomic RNA
ttacagaacaactgatgagt

SEQ ID NO: 31443 - RNA, 20 nt, African swine fever virus
  source 1..20: mol_type = genomic RNA
tacacgacagtcactactca

SEQ ID NO: 31444 - RNA, 20 nt, African swine fever virus
  source 1..20: mol_type = genomic RNA
actgagccttacacgacagt

SEQ ID NO: 31445 - RNA, 20 nt, African swine fever virus
  source 1..20: mol_type = genomic RNA
cgagtgctcatccgactgag

SEQ ID NO: 31446 - RNA, 20 nt, African swine fever virus
  source 1..20: mol_type = genomic RNA
gcggccgcgagtgctcatcc

SEQ ID NO: 31447 - RNA, 20 nt, African swine fever virus
  source 1..20: mol_type = genomic RNA
cacctgcggccgcgagtgct

SEQ ID NO: 31448 - RNA, 20 nt, African swine fever virus
  source 1..20: mol_type = genomic RNA
gttacggacagactagtcat

SEQ ID NO: 31449 - RNA, 20 nt, African swine fever virus
  source 1..20: mol_type = genomic RNA
agttacggacagactagtca

SEQ ID NO: 31450 - RNA, 20 nt, African swine fever virus
  source 1..20: mol_type = genomic RNA
gtcacggacaacccagttac

SEQ ID NO: 31451 - RNA, 20 nt, African swine fever virus
  source 1..20: mol_type = genomic RNA
gtcacgggcagaccggcaac

SEQ ID NO: 31452 - RNA, 20 nt, African swine fever virus
  source 1..20: mol_type = genomic RNA
gctggagcgactacagcaag

SEQ ID NO: 31453 - RNA, 20 nt, African swine fever virus
  source 1..20: mol_type = genomic RNA
tatcaagatcagcaatgggc

SEQ ID NO: 31454 - RNA, 20 nt, African swine fever virus
  source 1..20: mol_type = genomic RNA
cggcattatggtgagtgttt

SEQ ID NO: 31455 - RNA, 20 nt, African swine fever virus
  source 1..20: mol_type = genomic RNA
gtttatccgcggcattatgg

SEQ ID NO: 31456 - RNA, 20 nt, African swine fever virus
  source 1..20: mol_type = genomic RNA
ccaaggagtcgaggtcggct

SEQ ID NO: 31457 - RNA, 20 nt, African swine fever virus
  source 1..20: mol_type = genomic RNA
cgtccagcgtcttatttcga

SEQ ID NO: 31458 - RNA, 20 nt, African swine fever virus
  source 1..20: mol_type = genomic RNA
tgctgtcgctctcctccacg

SEQ ID NO: 31459 - RNA, 20 nt, African swine fever virus
  source 1..20: mol_type = genomic RNA
tggcttctagcgggtgcata

SEQ ID NO: 31460 - RNA, 20 nt, African swine fever virus
  source 1..20: mol_type = genomic RNA
atggcttctagcgggtgcat

SEQ ID NO: 31461 - RNA, 20 nt, African swine fever virus
  source 1..20: mol_type = genomic RNA
ggtcggcgtccgtgttggtt

SEQ ID NO: 31462 - RNA, 20 nt, African swine fever virus
  source 1..20: mol_type = genomic RNA
ccgggtcggcgtccgtgttg

SEQ ID NO: 31463 - RNA, 20 nt, African swine fever virus
  source 1..20: mol_type = genomic RNA
ttatcgctagtgaacacgac

SEQ ID NO: 31464 - RNA, 20 nt, African swine fever virus
  source 1..20: mol_type = genomic RNA
gaagccgaggacgggtctgc

SEQ ID NO: 31465 - RNA, 20 nt, African swine fever virus
  source 1..20: mol_type = genomic RNA
agagggctgaatactttgta

SEQ ID NO: 31466 - RNA, 20 nt, African swine fever virus
  source 1..20: mol_type = genomic RNA
cgacgaatatcttcagacat

SEQ ID NO: 31467 - RNA, 20 nt, African swine fever virus
  source 1..20: mol_type = genomic RNA
ggtccacgacgaatatcttc

SEQ ID NO: 31468 - RNA, 20 nt, African swine fever virus
  source 1..20: mol_type = genomic RNA
gccaggtccacgacgaatat

SEQ ID NO: 31469 - RNA, 20 nt, African swine fever virus
  source 1..20: mol_type = genomic RNA
taatctgatacgtgcactcc

SEQ ID NO: 31470 - RNA, 20 nt, African swine fever virus
  source 1..20: mol_type = genomic RNA
agaccgtaatctgatacgtg

SEQ ID NO: 31471 - RNA, 20 nt, African swine fever virus
  source 1..20: mol_type = genomic RNA
tatcgagctcgggctccgag

SEQ ID NO: 31472 - RNA, 20 nt, African swine fever virus
  source 1..20: mol_type = genomic RNA
tttcgataaggtccatatcg

SEQ ID NO: 31473 - RNA, 20 nt, African swine fever virus
  source 1..20: mol_type = genomic RNA
gcgcagaggatagttcttga

SEQ ID NO: 31474 - RNA, 20 nt, African swine fever virus
  source 1..20: mol_type = genomic RNA
gcgacttaggaatggtcgag

SEQ ID NO: 31475 - RNA, 20 nt, African swine fever virus
  source 1..20: mol_type = genomic RNA
gcgacttgatgtgagcaatt

SEQ ID NO: 31476 - RNA, 20 nt, African swine fever virus
  source 1..20: mol_type = genomic RNA
tagccgaggccagcgacttg

SEQ ID NO: 31477 - RNA, 20 nt, African swine fever virus
  source 1..20: mol_type = genomic RNA
gactacagcgtattatttag

SEQ ID NO: 31478 - RNA, 20 nt, African swine fever virus
  source 1..20: mol_type = genomic RNA
gaccggactacagcgtatta

SEQ ID NO: 31479 - RNA, 20 nt, African swine fever virus
  source 1..20: mol_type = genomic RNA
tgaccggactacagcgtatt

SEQ ID NO: 31480 - RNA, 20 nt, African swine fever virus
  source 1..20: mol_type = genomic RNA
ttagctttgtcttaccgggc

SEQ ID NO: 31481 - RNA, 20 nt, African swine fever virus
  source 1..20: mol_type = genomic RNA
gctgaacgcctttagctttg

SEQ ID NO: 31482 - RNA, 20 nt, African swine fever virus
  source 1..20: mol_type = genomic RNA
tcacgctgggcgggcattgc

SEQ ID NO: 31483 - RNA, 20 nt, African swine fever virus
  source 1..20: mol_type = genomic RNA
tcactcgattgacgtaaccg

SEQ ID NO: 31484 - RNA, 20 nt, African swine fever virus
  source 1..20: mol_type = genomic RNA
ttcactcgattgacgtaacc

SEQ ID NO: 31485 - RNA, 20 nt, African swine fever virus
  source 1..20: mol_type = genomic RNA
agggatcccttcactcgatt

SEQ ID NO: 31486 - RNA, 20 nt, African swine fever virus
  source 1..20: mol_type = genomic RNA
aagggatcccttcactcgat

SEQ ID NO: 31487 - RNA, 20 nt, African swine fever virus
  source 1..20: mol_type = genomic RNA
tcgcatacatgcgctttaga

SEQ ID NO: 31488 - RNA, 20 nt, African swine fever virus
  source 1..20: mol_type = genomic RNA
atgaatcgtccatcgcatac

SEQ ID NO: 31489 - RNA, 20 nt, African swine fever virus
  source 1..20: mol_type = genomic RNA
gatgaatcgtccatcgcata

SEQ ID NO: 31490 - RNA, 20 nt, African swine fever virus
  source 1..20: mol_type = genomic RNA
cgatgaatcgtccatcgcat

SEQ ID NO: 31491 - RNA, 20 nt, African swine fever virus
  source 1..20: mol_type = genomic RNA
ccgatgaatcgtccatcgca

SEQ ID NO: 31492 - RNA, 20 nt, African swine fever virus
  source 1..20: mol_type = genomic RNA
tatgtcagaacattgcagaa

SEQ ID NO: 31493 - RNA, 20 nt, African swine fever virus
  source 1..20: mol_type = genomic RNA
ccggactcaccatatgtcag

SEQ ID NO: 31494 - RNA, 20 nt, African swine fever virus
  source 1..20: mol_type = genomic RNA
atgggctgaatgtgcgtttg

SEQ ID NO: 31495 - RNA, 20 nt, African swine fever virus
  source 1..20: mol_type = genomic RNA
gtgtgaactccggcacccta

SEQ ID NO: 31496 - RNA, 20 nt, African swine fever virus
  source 1..20: mol_type = genomic RNA
tccgtttattcgttatcacg

SEQ ID NO: 31497 - RNA, 20 nt, African swine fever virus
  source 1..20: mol_type = genomic RNA
aggtccttccgtttattcgt

SEQ ID NO: 31498 - RNA, 20 nt, African swine fever virus
  source 1..20: mol_type = genomic RNA
caggtccttccgtttattcg

SEQ ID NO: 31499 - RNA, 20 nt, African swine fever virus
  source 1..20: mol_type = genomic RNA
ggttgaagcactaggtcgga

SEQ ID NO: 31500 - RNA, 20 nt, African swine fever virus
  source 1..20: mol_type = genomic RNA
tgtgttcgcatgctacttta

SEQ ID NO: 31501 - RNA, 20 nt, African swine fever virus
  source 1..20: mol_type = genomic RNA
atgtgttcgcatgctacttt

SEQ ID NO: 31502 - RNA, 20 nt, African swine fever virus
  source 1..20: mol_type = genomic RNA
acatagcccgggtctattaa

SEQ ID NO: 31503 - RNA, 20 nt, African swine fever virus
  source 1..20: mol_type = genomic RNA
tgggccaccaactgcaccaa

SEQ ID NO: 31504 - RNA, 20 nt, African swine fever virus
  source 1..20: mol_type = genomic RNA
tcaccgaatacgcctatgta

SEQ ID NO: 31505 - RNA, 20 nt, African swine fever virus
  source 1..20: mol_type = genomic RNA
ttgggttaacgcaacttctt

SEQ ID NO: 31506 - RNA, 20 nt, African swine fever virus
  source 1..20: mol_type = genomic RNA
tccattgggttaacgcaact

SEQ ID NO: 31507 - RNA, 20 nt, African swine fever virus
  source 1..20: mol_type = genomic RNA
gcacgttcatacccgacagg

SEQ ID NO: 31508 - RNA, 20 nt, African swine fever virus
  source 1..20: mol_type = genomic RNA
ccagcacgttcatacccgac

SEQ ID NO: 31509 - RNA, 20 nt, African swine fever virus
  source 1..20: mol_type = genomic RNA
ttcaccaccagcacgttcat

SEQ ID NO: 31510 - RNA, 20 nt, African swine fever virus
  source 1..20: mol_type = genomic RNA
gttgtggtgtctatggcctg

SEQ ID NO: 31511 - RNA, 20 nt, African swine fever virus
  source 1..20: mol_type = genomic RNA
tgttagtgatgccggttgtg

SEQ ID NO: 31512 - RNA, 20 nt, African swine fever virus
  source 1..20: mol_type = genomic RNA
acgatgattagaacgataac

SEQ ID NO: 31513 - RNA, 20 nt, African swine fever virus
  source 1..20: mol_type = genomic RNA
tacgatgattagaacgataa

SEQ ID NO: 31514 - RNA, 20 nt, African swine fever virus
  source 1..20: mol_type = genomic RNA
cgtggcggtgccgtgaatgc

SEQ ID NO: 31515 - RNA, 20 nt, African swine fever virus
  source 1..20: mol_type = genomic RNA
cctcgtggcggtgccgtgaa

SEQ ID NO: 31516 - RNA, 20 nt, African swine fever virus
  source 1..20: mol_type = genomic RNA
gtccctcgaatcttctttca

SEQ ID NO: 31517 - RNA, 20 nt, African swine fever virus
  source 1..20: mol_type = genomic RNA
atagaggtccggtccctcga

SEQ ID NO: 31518 - RNA, 20 nt, African swine fever virus
  source 1..20: mol_type = genomic RNA
gctgcgaagctcggtataat

SEQ ID NO: 31519 - RNA, 20 nt, African swine fever virus
  source 1..20: mol_type = genomic RNA
agcctgctgcgaagctcggt

SEQ ID NO: 31520 - RNA, 20 nt, African swine fever virus
  source 1..20: mol_type = genomic RNA
tgttgtgggtcaattgtgaa

SEQ ID NO: 31521 - RNA, 20 nt, African swine fever virus
  source 1..20: mol_type = genomic RNA
atttgttcgccgaaggctac

SEQ ID NO: 31522 - RNA, 20 nt, African swine fever virus
  source 1..20: mol_type = genomic RNA
gggcacatctaagtaggttc

SEQ ID NO: 31523 - RNA, 20 nt, African swine fever virus
  source 1..20: mol_type = genomic RNA
acgggaccagggcacatcta

SEQ ID NO: 31524 - RNA, 20 nt, African swine fever virus
  source 1..20: mol_type = genomic RNA
cgataagttcaggctccacg

SEQ ID NO: 31525 - RNA, 20 nt, African swine fever virus
  source 1..20: mol_type = genomic RNA
tccacgataagttcaggctc

SEQ ID NO: 31526 - RNA, 20 nt, African swine fever virus
  source 1..20: mol_type = genomic RNA
gcgtcattatagctggagat

SEQ ID NO: 31527 - RNA, 20 nt, African swine fever virus
  source 1..20: mol_type = genomic RNA
cttccgcattctgtggcggc

SEQ ID NO: 31528 - RNA, 20 nt, African swine fever virus
  source 1..20: mol_type = genomic RNA
gacactggtgacgcgtaatg

SEQ ID NO: 31529 - RNA, 20 nt, African swine fever virus
  source 1..20: mol_type = genomic RNA
tacgaagaagcagtcctatt

SEQ ID NO: 31530 - RNA, 20 nt, African swine fever virus
  source 1..20: mol_type = genomic RNA
gaacttgaacgatctctgtt

SEQ ID NO: 31531 - RNA, 20 nt, African swine fever virus
  source 1..20: mol_type = genomic RNA
tccagaacttgaacgatctc

SEQ ID NO: 31532 - RNA, 20 nt, African swine fever virus
  source 1..20: mol_type = genomic RNA
aatgcgaccgtccagaactt

SEQ ID NO: 31533 - RNA, 20 nt, African swine fever virus
  source 1..20: mol_type = genomic RNA
agggtgaatgggtacgaagt

SEQ ID NO: 31534 - RNA, 20 nt, African swine fever virus
  source 1..20: mol_type = genomic RNA
gagggtgaatgggtacgaag

SEQ ID NO: 31535 - RNA, 20 nt, African swine fever virus
  source 1..20: mol_type = genomic RNA
tcttcataagggagggcccg

SEQ ID NO: 31536 - RNA, 20 nt, African swine fever virus
  source 1..20: mol_type = genomic RNA
accgacacccttcaggcctt

SEQ ID NO: 31537 - RNA, 20 nt, African swine fever virus
  source 1..20: mol_type = genomic RNA
gaattcaatagccttgccaa

SEQ ID NO: 31538 - RNA, 20 nt, African swine fever virus
  source 1..20: mol_type = genomic RNA
ctcccgaattcaatagcctt

SEQ ID NO: 31539 - RNA, 20 nt, African swine fever virus
  source 1..20: mol_type = genomic RNA
actcccgaattcaatagcct

SEQ ID NO: 31540 - RNA, 20 nt, African swine fever virus
  source 1..20: mol_type = genomic RNA
gtcgcgccacattcaccatt

SEQ ID NO: 31541 - RNA, 20 nt, African swine fever virus
  source 1..20: mol_type = genomic RNA
atttggatatataagccgtg

SEQ ID NO: 31542 - RNA, 20 nt, African swine fever virus
  source 1..20: mol_type = genomic RNA
actctgcgagaatttctgaa

SEQ ID NO: 31543 - RNA, 20 nt, African swine fever virus
  source 1..20: mol_type = genomic RNA
tttgttgtttacggatttgc

SEQ ID NO: 31544 - RNA, 20 nt, African swine fever virus
  source 1..20: mol_type = genomic RNA
gacgaagctcattatttgtt

SEQ ID NO: 31545 - RNA, 20 nt, African swine fever virus
  source 1..20: mol_type = genomic RNA
cgatgagccttccacgatat

SEQ ID NO: 31546 - RNA, 20 nt, African swine fever virus
  source 1..20: mol_type = genomic RNA
tcgatgagccttccacgata

SEQ ID NO: 31547 - RNA, 20 nt, African swine fever virus
  source 1..20: mol_type = genomic RNA
aactgcaagcagcgtatgtg

SEQ ID NO: 31548 - RNA, 20 nt, African swine fever virus
  source 1..20: mol_type = genomic RNA
gaggcaattggtagcatgac

SEQ ID NO: 31549 - RNA, 20 nt, African swine fever virus
  source 1..20: mol_type = genomic RNA
taataagctaatttctggcg

SEQ ID NO: 31550 - RNA, 20 nt, African swine fever virus
  source 1..20: mol_type = genomic RNA
gcagcaggataacgatgccc

SEQ ID NO: 31551 - RNA, 20 nt, African swine fever virus
  source 1..20: mol_type = genomic RNA
ttgtgggacgatcaatcata

SEQ ID NO: 31552 - RNA, 20 nt, African swine fever virus
  source 1..20: mol_type = genomic RNA
gttgtgggacgatcaatcat

SEQ ID NO: 31553 - RNA, 20 nt, African swine fever virus
  source 1..20: mol_type = genomic RNA
cgtgttatcattatacgtac

SEQ ID NO: 31554 - RNA, 20 nt, African swine fever virus
  source 1..20: mol_type = genomic RNA
gagacagcagttgtagaaga

SEQ ID NO: 31555 - RNA, 20 nt, African swine fever virus
  source 1..20: mol_type = genomic RNA
aacctacctatattacaata

SEQ ID NO: 31556 - RNA, 20 nt, African swine fever virus
  source 1..20: mol_type = genomic RNA
aaggtataacgatttacaag

SEQ ID NO: 31557 - RNA, 20 nt, African swine fever virus
  source 1..20: mol_type = genomic RNA
catcatccgctgcgggatga

SEQ ID NO: 31558 - RNA, 20 nt, African swine fever virus
  source 1..20: mol_type = genomic RNA
gaatacccatatgcaccacc

SEQ ID NO: 31559 - RNA, 20 nt, African swine fever virus
  source 1..20: mol_type = genomic RNA
tcgcatttgatgattatgcc

SEQ ID NO: 31560 - RNA, 20 nt, African swine fever virus
  source 1..20: mol_type = genomic RNA
ttaccggcaagctaggattt

SEQ ID NO: 31561 - RNA, 20 nt, African swine fever virus
  source 1..20: mol_type = genomic RNA
ctatatcttagtgttaacgg

SEQ ID NO: 31562 - RNA, 20 nt, African swine fever virus
  source 1..20: mol_type = genomic RNA
tatagacctactacagtgat

SEQ ID NO: 31563 - RNA, 20 nt, African swine fever virus
  source 1..20: mol_type = genomic RNA
ataactttatatcgagctat

SEQ ID NO: 31564 - RNA, 20 nt, African swine fever virus
  source 1..20: mol_type = genomic RNA
ctataactttatatcgagct

SEQ ID NO: 31565 - RNA, 20 nt, African swine fever virus
  source 1..20: mol_type = genomic RNA
tttagcacagataagactgt

SEQ ID NO: 31566 - RNA, 20 nt, African swine fever virus
  source 1..20: mol_type = genomic RNA
acgatgagtcctattcactt

SEQ ID NO: 31567 - RNA, 20 nt, African swine fever virus
  source 1..20: mol_type = genomic RNA
tgatatatcgtttcagagta

SEQ ID NO: 31568 - RNA, 20 nt, African swine fever virus
  source 1..20: mol_type = genomic RNA
tcagtattggatagtgatac

SEQ ID NO: 31569 - RNA, 20 nt, African swine fever virus
  source 1..20: mol_type = genomic RNA
accattatgttgttgcaatg

SEQ ID NO: 31570 - RNA, 20 nt, African swine fever virus
  source 1..20: mol_type = genomic RNA
tgattgtaacacataggata

SEQ ID NO: 31571 - RNA, 20 nt, African swine fever virus
  source 1..20: mol_type = genomic RNA
cctaatcagatcattatcat

SEQ ID NO: 31572 - RNA, 20 nt, African swine fever virus
  source 1..20: mol_type = genomic RNA
tgagaggtatacgggccttc

SEQ ID NO: 31573 - RNA, 20 nt, African swine fever virus
  source 1..20: mol_type = genomic RNA
tggcataccagtatcgctgc

SEQ ID NO: 31574 - RNA, 20 nt, African swine fever virus
  source 1..20: mol_type = genomic RNA
gttgacaagcaatgttcatc

SEQ ID NO: 31575 - RNA, 20 nt, African swine fever virus
  source 1..20: mol_type = genomic RNA
aatatgtgctgtaacactct

SEQ ID NO: 31576 - RNA, 20 nt, African swine fever virus
  source 1..20: mol_type = genomic RNA
tctcatagactcccttatag

SEQ ID NO: 31577 - RNA, 20 nt, African swine fever virus
  source 1..20: mol_type = genomic RNA
tgttaatggtgcttgcggaa

SEQ ID NO: 31578 - RNA, 20 nt, African swine fever virus
  source 1..20: mol_type = genomic RNA
tcgttcccttgttaatggtg

SEQ ID NO: 31579 - RNA, 20 nt, African swine fever virus
  source 1..20: mol_type = genomic RNA
atcgttcccttgttaatggt

SEQ ID NO: 31580 - RNA, 20 nt, African swine fever virus
  source 1..20: mol_type = genomic RNA
tcgaatatttgcgtgaattt

SEQ ID NO: 31581 - RNA, 20 nt, African swine fever virus
  source 1..20: mol_type = genomic RNA
agcggtggccatcgaatatt

SEQ ID NO: 31582 - RNA, 20 nt, African swine fever virus
  source 1..20: mol_type = genomic RNA
tcatttcacgcaatcataag

SEQ ID NO: 31583 - RNA, 20 nt, African swine fever virus
  source 1..20: mol_type = genomic RNA
gattatctcattatttcgat

SEQ ID NO: 31584 - RNA, 20 nt, African swine fever virus
  source 1..20: mol_type = genomic RNA
acccattatataccctgatt

SEQ ID NO: 31585 - RNA, 20 nt, African swine fever virus
  source 1..20: mol_type = genomic RNA
ttagattgggcgactattct

SEQ ID NO: 31586 - RNA, 20 nt, African swine fever virus
  source 1..20: mol_type = genomic RNA
atttgcgatagcttgcaagg

SEQ ID NO: 31587 - RNA, 20 nt, African swine fever virus
  source 1..20: mol_type = genomic RNA
tatttgcgatagcttgcaag

SEQ ID NO: 31588 - RNA, 20 nt, African swine fever virus
  source 1..20: mol_type = genomic RNA
atgggtcgagcctgaatatg

SEQ ID NO: 31589 - RNA, 20 nt, African swine fever virus
  source 1..20: mol_type = genomic RNA
gagaacgcttcacaactaac

SEQ ID NO: 31590 - RNA, 20 nt, African swine fever virus
  source 1..20: mol_type = genomic RNA
ttctgcttacggacgatgca

SEQ ID NO: 31591 - RNA, 20 nt, African swine fever virus
  source 1..20: mol_type = genomic RNA
gtatagctcaatagccttgt

SEQ ID NO: 31592 - RNA, 20 nt, African swine fever virus
  source 1..20: mol_type = genomic RNA
gttcctcatatcgtacaata

SEQ ID NO: 31593 - RNA, 20 nt, African swine fever virus
  source 1..20: mol_type = genomic RNA
taagaactgcgcgggtcaga

SEQ ID NO: 31594 - RNA, 20 nt, African swine fever virus
  source 1..20: mol_type = genomic RNA
ggttgttgctctcaagactt

SEQ ID NO: 31595 - RNA, 20 nt, African swine fever virus
  source 1..20: mol_type = genomic RNA
tacctggttgttgctctcaa

SEQ ID NO: 31596 - RNA, 20 nt, African swine fever virus
  source 1..20: mol_type = genomic RNA
tgaggctgcctcccatcaag

SEQ ID NO: 31597 - RNA, 20 nt, African swine fever virus
  source 1..20: mol_type = genomic RNA
atccacggtgctcctgcggc

SEQ ID NO: 31598 - RNA, 20 nt, African swine fever virus
  source 1..20: mol_type = genomic RNA
gatcgcgagcgtggaggagc

SEQ ID NO: 31599 - RNA, 20 nt, African swine fever virus
  source 1..20: mol_type = genomic RNA
gcgccggatcgcgagcgtgg

SEQ ID NO: 31600 - RNA, 20 nt, African swine fever virus
  source 1..20: mol_type = genomic RNA
cttccagcgccggatcgcga

SEQ ID NO: 31601 - RNA, 20 nt, African swine fever virus
  source 1..20: mol_type = genomic RNA
acgacatcgagcgcaagggt

SEQ ID NO: 31602 - RNA, 20 nt, African swine fever virus
  source 1..20: mol_type = genomic RNA
tcgaggtatgggaagccgac

SEQ ID NO: 31603 - RNA, 20 nt, African swine fever virus
  source 1..20: mol_type = genomic RNA
gctggtttctcgggtgcatt

SEQ ID NO: 31604 - RNA, 20 nt, African swine fever virus
  source 1..20: mol_type = genomic RNA
caacactttaatatatgata

SEQ ID NO: 31605 - RNA, 20 nt, African swine fever virus
  source 1..20: mol_type = genomic RNA
ggcatgctcagtattaatgg

SEQ ID NO: 31606 - RNA, 20 nt, African swine fever virus
  source 1..20: mol_type = genomic RNA
gggcatgctcagtattaatg

SEQ ID NO: 31607 - RNA, 20 nt, African swine fever virus
  source 1..20: mol_type = genomic RNA
ctcgttgaagtccatgaatc

SEQ ID NO: 31608 - RNA, 20 nt, African swine fever virus
  source 1..20: mol_type = genomic RNA
taactggtgttacgccgccg

SEQ ID NO: 31609 - RNA, 20 nt, African swine fever virus
  source 1..20: mol_type = genomic RNA
gcggcgtaacaccagttatg

SEQ ID NO: 31610 - RNA, 20 nt, African swine fever virus
  source 1..20: mol_type = genomic RNA
ttaatactgagcatgcccgg

SEQ ID NO: 31611 - RNA, 20 nt, African swine fever virus
  source 1..20: mol_type = genomic RNA
aatacgctccatccagaaga

SEQ ID NO: 31612 - RNA, 20 nt, African swine fever virus
  source 1..20: mol_type = genomic RNA
taatacgctccatccagaag

SEQ ID NO: 31613 - RNA, 20 nt, African swine fever virus
  source 1..20: mol_type = genomic RNA
gctggagcgaatcatatacc

SEQ ID NO: 31614 - RNA, 20 nt, African swine fever virus
  source 1..20: mol_type = genomic RNA
gttgatatgaacgatatatc

SEQ ID NO: 31615 - RNA, 20 nt, African swine fever virus
  source 1..20: mol_type = genomic RNA
tacctcgacggctgcagcaa

SEQ ID NO: 31616 - RNA, 20 nt, African swine fever virus
  source 1..20: mol_type = genomic RNA
tgcgctcgatgtcgtcggct

SEQ ID NO: 31617 - RNA, 20 nt, African swine fever virus
  source 1..20: mol_type = genomic RNA
ttgcgctcgatgtcgtcggc

SEQ ID NO: 31618 - RNA, 20 nt, African swine fever virus
  source 1..20: mol_type = genomic RNA
gggacccttgcgctcgatgt

SEQ ID NO: 31619 - RNA, 20 nt, African swine fever virus
  source 1..20: mol_type = genomic RNA
agggacccttgcgctcgatg

SEQ ID NO: 31620 - RNA, 20 nt, African swine fever virus
  source 1..20: mol_type = genomic RNA
gcgctggaagcggaaccgat

SEQ ID NO: 31621 - RNA, 20 nt, African swine fever virus
  source 1..20: mol_type = genomic RNA
cgctcgcgatccggcgctgg

SEQ ID NO: 31622 - RNA, 20 nt, African swine fever virus
  source 1..20: mol_type = genomic RNA
ccacgctcgcgatccggcgc

SEQ ID NO: 31623 - RNA, 20 nt, African swine fever virus
  source 1..20: mol_type = genomic RNA
tggataggagctcctccacg

SEQ ID NO: 31624 - RNA, 20 nt, African swine fever virus
  source 1..20: mol_type = genomic RNA
cacgacttcttactgctgct

SEQ ID NO: 31625 - RNA, 20 nt, African swine fever virus
  source 1..20: mol_type = genomic RNA
ggtagggatttgctatgctt

SEQ ID NO: 31626 - RNA, 20 nt, African swine fever virus
  source 1..20: mol_type = genomic RNA
cgcagttcttacggatgcca

SEQ ID NO: 31627 - RNA, 20 nt, African swine fever virus
  source 1..20: mol_type = genomic RNA
gcgcagttcttacggatgcc

SEQ ID NO: 31628 - RNA, 20 nt, African swine fever virus
  source 1..20: mol_type = genomic RNA
gactttgctgaactggcctt

SEQ ID NO: 31629 - RNA, 20 nt, African swine fever virus
  source 1..20: mol_type = genomic RNA
tatttgtcatgctcctttag

SEQ ID NO: 31630 - RNA, 20 nt, African swine fever virus
  source 1..20: mol_type = genomic RNA
agctatccatatttgtcatg

SEQ ID NO: 31631 - RNA, 20 nt, African swine fever virus
  source 1..20: mol_type = genomic RNA
caacaaggctattgagctat

SEQ ID NO: 31632 - RNA, 20 nt, African swine fever virus
  source 1..20: mol_type = genomic RNA
tatttggtaggtaacttctg

SEQ ID NO: 31633 - RNA, 20 nt, African swine fever virus
  source 1..20: mol_type = genomic RNA
ggagccatgtgtagcatgtc

SEQ ID NO: 31634 - RNA, 20 nt, African swine fever virus
  source 1..20: mol_type = genomic RNA
cctggagccatgtgtagcat

SEQ ID NO: 31635 - RNA, 20 nt, African swine fever virus
  source 1..20: mol_type = genomic RNA
gggcatactttaagacgctc

SEQ ID NO: 31636 - RNA, 20 nt, African swine fever virus
  source 1..20: mol_type = genomic RNA
gctttgccagggcatacttt

SEQ ID NO: 31637 - RNA, 20 nt, African swine fever virus
  source 1..20: mol_type = genomic RNA
atggaatgtcgaataatgta

SEQ ID NO: 31638 - RNA, 20 nt, African swine fever virus
  source 1..20: mol_type = genomic RNA
agcgataagatgaatgtgcc

SEQ ID NO: 31639 - RNA, 20 nt, African swine fever virus
  source 1..20: mol_type = genomic RNA
tcggttatagtacgcagcat

SEQ ID NO: 31640 - RNA, 20 nt, African swine fever virus
  source 1..20: mol_type = genomic RNA
ttgattgcggcactaagtgc

SEQ ID NO: 31641 - RNA, 20 nt, African swine fever virus
  source 1..20: mol_type = genomic RNA
aatcaatgaccgtcatctga

SEQ ID NO: 31642 - RNA, 20 nt, African swine fever virus
  source 1..20: mol_type = genomic RNA
cgatgatgtcgatgttgtct

SEQ ID NO: 31643 - RNA, 20 nt, African swine fever virus
  source 1..20: mol_type = genomic RNA
tgcaagccgcgatgatgtcg

SEQ ID NO: 31644 - RNA, 20 nt, African swine fever virus
  source 1..20: mol_type = genomic RNA
ccgcttggacgactgtgtaa

SEQ ID NO: 31645 - RNA, 20 nt, African swine fever virus
  source 1..20: mol_type = genomic RNA
ttaacaagggaacgatggga

SEQ ID NO: 31646 - RNA, 20 nt, African swine fever virus
  source 1..20: mol_type = genomic RNA
gcttcactttctgatcagac

SEQ ID NO: 31647 - RNA, 20 nt, African swine fever virus
  source 1..20: mol_type = genomic RNA
tgatgcttgcaggactgtaa

SEQ ID NO: 31648 - RNA, 20 nt, African swine fever virus
  source 1..20: mol_type = genomic RNA
tatacctctcatggaacaac

SEQ ID NO: 31649 - RNA, 20 nt, African swine fever virus
  source 1..20: mol_type = genomic RNA
tgaaggcccgtatacctctc

SEQ ID NO: 31650 - RNA, 20 nt, African swine fever virus
  source 1..20: mol_type = genomic RNA
atactgaaggtctttgggct

SEQ ID NO: 31651 - RNA, 20 nt, African swine fever virus
  source 1..20: mol_type = genomic RNA
agtatcactatccaatactg

SEQ ID NO: 31652 - RNA, 20 nt, African swine fever virus
  source 1..20: mol_type = genomic RNA
actccaagtatcactatcca

SEQ ID NO: 31653 - RNA, 20 nt, African swine fever virus
  source 1..20: mol_type = genomic RNA
tatcggagaacgtcctctta

SEQ ID NO: 31654 - RNA, 20 nt, African swine fever virus
  source 1..20: mol_type = genomic RNA
agctgtccttggatatacta

SEQ ID NO: 31655 - RNA, 20 nt, African swine fever virus
  source 1..20: mol_type = genomic RNA
caatgcggttcatgttaagt

SEQ ID NO: 31656 - RNA, 20 nt, African swine fever virus
  source 1..20: mol_type = genomic RNA
tcctcaatgcggttcatgtt

SEQ ID NO: 31657 - RNA, 20 nt, African swine fever virus
  source 1..20: mol_type = genomic RNA
acaatagaatcggtgtcatc

SEQ ID NO: 31658 - RNA, 20 nt, African swine fever virus
  source 1..20: mol_type = genomic RNA
cgtaatagcttgataattat

SEQ ID NO: 31659 - RNA, 20 nt, African swine fever virus
  source 1..20: mol_type = genomic RNA
ttaacactaagatatagagg

SEQ ID NO: 31660 - RNA, 20 nt, African swine fever virus
  source 1..20: mol_type = genomic RNA
agcttgccggtaatggctat

SEQ ID NO: 31661 - RNA, 20 nt, African swine fever virus
  source 1..20: mol_type = genomic RNA
taagatcacatcccattcag

SEQ ID NO: 31662 - RNA, 20 nt, African swine fever virus
  source 1..20: mol_type = genomic RNA
ttaagatcacatcccattca

SEQ ID NO: 31663 - RNA, 20 nt, African swine fever virus
  source 1..20: mol_type = genomic RNA
gagaccaagtcattccctgt

SEQ ID NO: 31664 - RNA, 20 nt, African swine fever virus
  source 1..20: mol_type = genomic RNA
gtggtttaatcctacctgtt

SEQ ID NO: 31665 - RNA, 20 nt, African swine fever virus
  source 1..20: mol_type = genomic RNA
gcagcattgcttggtatagt

SEQ ID NO: 31666 - RNA, 20 nt, African swine fever virus
  source 1..20: mol_type = genomic RNA
cagcggatgatgcggatgtc

SEQ ID NO: 31667 - RNA, 20 nt, African swine fever virus
  source 1..20: mol_type = genomic RNA
gcagcggatgatgcggatgt

SEQ ID NO: 31668 - RNA, 20 nt, African swine fever virus
  source 1..20: mol_type = genomic RNA
caacgggttgaatattcttc

SEQ ID NO: 31669 - RNA, 20 nt, African swine fever virus
  source 1..20: mol_type = genomic RNA
ttaaggcggcagagggacaa

SEQ ID NO: 31670 - RNA, 20 nt, African swine fever virus
  source 1..20: mol_type = genomic RNA
tcaacgtcaatcaacaccaa

SEQ ID NO: 31671 - RNA, 20 nt, African swine fever virus
  source 1..20: mol_type = genomic RNA
gaagggtgtcggttggcaag

SEQ ID NO: 31672 - RNA, 20 nt, African swine fever virus
  source 1..20: mol_type = genomic RNA
ttatgaagaaggagtatttg

SEQ ID NO: 31673 - RNA, 20 nt, African swine fever virus
  source 1..20: mol_type = genomic RNA
cccttatgaagaaggagtat

SEQ ID NO: 31674 - RNA, 20 nt, African swine fever virus
  source 1..20: mol_type = genomic RNA
cgggccctcccttatgaaga

SEQ ID NO: 31675 - RNA, 20 nt, African swine fever virus
  source 1..20: mol_type = genomic RNA
tcgggccctcccttatgaag

SEQ ID NO: 31676 - RNA, 20 nt, African swine fever virus
  source 1..20: mol_type = genomic RNA
attcaccctcgggccctccc

SEQ ID NO: 31677 - RNA, 20 nt, African swine fever virus
  source 1..20: mol_type = genomic RNA
taataaccgctttagcgcaa

SEQ ID NO: 31678 - RNA, 20 nt, African swine fever virus
  source 1..20: mol_type = genomic RNA
ctttaaccgcagaatttact

SEQ ID NO: 31679 - RNA, 20 nt, African swine fever virus
  source 1..20: mol_type = genomic RNA
gtgtccggctatattggaga

SEQ ID NO: 31680 - RNA, 20 nt, African swine fever virus
  source 1..20: mol_type = genomic RNA
ccacagaatgcggaagcggt

SEQ ID NO: 31681 - RNA, 20 nt, African swine fever virus
  source 1..20: mol_type = genomic RNA
ccaagccacattatgttcca

SEQ ID NO: 31682 - RNA, 20 nt, African swine fever virus
  source 1..20: mol_type = genomic RNA
gtgtcaacatctccagctat

SEQ ID NO: 31683 - RNA, 20 nt, African swine fever virus
  source 1..20: mol_type = genomic RNA
tggagcctgaacttatcgtg

SEQ ID NO: 31684 - RNA, 20 nt, African swine fever virus
  source 1..20: mol_type = genomic RNA
aggcgccgtggagcctgaac

SEQ ID NO: 31685 - RNA, 20 nt, African swine fever virus
  source 1..20: mol_type = genomic RNA
taggagtgcgtttgttacac

SEQ ID NO: 31686 - RNA, 20 nt, African swine fever virus
  source 1..20: mol_type = genomic RNA
gtaggagtgcgtttgttaca

SEQ ID NO: 31687 - RNA, 20 nt, African swine fever virus
  source 1..20: mol_type = genomic RNA
ggtcccgtaggagtgcgttt

SEQ ID NO: 31688 - RNA, 20 nt, African swine fever virus
  source 1..20: mol_type = genomic RNA
tggtcccgtaggagtgcgtt

SEQ ID NO: 31689 - RNA, 20 nt, African swine fever virus
  source 1..20: mol_type = genomic RNA
ccgtttgtggtcagatagtg

SEQ ID NO: 31690 - RNA, 20 nt, African swine fever virus
  source 1..20: mol_type = genomic RNA
gtattcacaattgacccaca

SEQ ID NO: 31691 - RNA, 20 nt, African swine fever virus
  source 1..20: mol_type = genomic RNA
tgtattcacaattgacccac

SEQ ID NO: 31692 - RNA, 20 nt, African swine fever virus
  source 1..20: mol_type = genomic RNA
catcaacttccctgtattca

SEQ ID NO: 31693 - RNA, 20 nt, African swine fever virus
  source 1..20: mol_type = genomic RNA
acacgattataccgagcttc

SEQ ID NO: 31694 - RNA, 20 nt, African swine fever virus
  source 1..20: mol_type = genomic RNA
gacctctataggttctctag

SEQ ID NO: 31695 - RNA, 20 nt, African swine fever virus
  source 1..20: mol_type = genomic RNA
caaccggcatcactaacacg

SEQ ID NO: 31696 - RNA, 20 nt, African swine fever virus
  source 1..20: mol_type = genomic RNA
tagacaccacaaccggcatc

SEQ ID NO: 31697 - RNA, 20 nt, African swine fever virus
  source 1..20: mol_type = genomic RNA
gtcgggtatgaacgtgctgg

SEQ ID NO: 31698 - RNA, 20 nt, African swine fever virus
  source 1..20: mol_type = genomic RNA
tgtcgggtatgaacgtgctg

SEQ ID NO: 31699 - RNA, 20 nt, African swine fever virus
  source 1..20: mol_type = genomic RNA
aatggatggacgcaggacat

SEQ ID NO: 31700 - RNA, 20 nt, African swine fever virus
  source 1..20: mol_type = genomic RNA
agaagttgcgttaacccaat

SEQ ID NO: 31701 - RNA, 20 nt, African swine fever virus
  source 1..20: mol_type = genomic RNA
aagaggcgagggtagatttg

SEQ ID NO: 31702 - RNA, 20 nt, African swine fever virus
  source 1..20: mol_type = genomic RNA
aatatttccgctgtttgcgc

SEQ ID NO: 31703 - RNA, 20 nt, African swine fever virus
  source 1..20: mol_type = genomic RNA
aggtgaccatgtgcctgacc

SEQ ID NO: 31704 - RNA, 20 nt, African swine fever virus
  source 1..20: mol_type = genomic RNA
ggctatgtgggcgagctcat

SEQ ID NO: 31705 - RNA, 20 nt, African swine fever virus
  source 1..20: mol_type = genomic RNA
gggctatgtgggcgagctca

SEQ ID NO: 31706 - RNA, 20 nt, African swine fever virus
  source 1..20: mol_type = genomic RNA
tgaacggctgctcatccttg

SEQ ID NO: 31707 - RNA, 20 nt, African swine fever virus
  source 1..20: mol_type = genomic RNA
atgaacggctgctcatcctt

SEQ ID NO: 31708 - RNA, 20 nt, African swine fever virus
  source 1..20: mol_type = genomic RNA
agtgcttcaacctggactaa

SEQ ID NO: 31709 - RNA, 20 nt, African swine fever virus
  source 1..20: mol_type = genomic RNA
ccttccgtgataacgaataa

SEQ ID NO: 31710 - RNA, 20 nt, African swine fever virus
  source 1..20: mol_type = genomic RNA
accttccgtgataacgaata

SEQ ID NO: 31711 - RNA, 20 nt, African swine fever virus
  source 1..20: mol_type = genomic RNA
ccgccgtttgttgatttgta

SEQ ID NO: 31712 - RNA, 20 nt, African swine fever virus
  source 1..20: mol_type = genomic RNA
ataatattgtcatcctccgc

SEQ ID NO: 31713 - RNA, 20 nt, African swine fever virus
  source 1..20: mol_type = genomic RNA
aataatattgtcatcctccg

SEQ ID NO: 31714 - RNA, 20 nt, African swine fever virus
  source 1..20: mol_type = genomic RNA
gtttatcgcatatgctccca

SEQ ID NO: 31715 - RNA, 20 nt, African swine fever virus
  source 1..20: mol_type = genomic RNA
tgtttatcgcatatgctccc

SEQ ID NO: 31716 - RNA, 20 nt, African swine fever virus
  source 1..20: mol_type = genomic RNA
tagggtgccggagttcacac

SEQ ID NO: 31717 - RNA, 20 nt, African swine fever virus
  source 1..20: mol_type = genomic RNA
atagggtgccggagttcaca

SEQ ID NO: 31718 - RNA, 20 nt, African swine fever virus
  source 1..20: mol_type = genomic RNA
agcctccgtattctgcaatg

SEQ ID NO: 31719 - RNA, 20 nt, African swine fever virus
  source 1..20: mol_type = genomic RNA
acacaatagttatagacaac

SEQ ID NO: 31720 - RNA, 20 nt, African swine fever virus
  source 1..20: mol_type = genomic RNA
ttagccatgttgtttaacac

SEQ ID NO: 31721 - RNA, 20 nt, African swine fever virus
  source 1..20: mol_type = genomic RNA
atcatttacgcccggtaaga

SEQ ID NO: 31722 - RNA, 20 nt, African swine fever virus
  source 1..20: mol_type = genomic RNA
tatcatttacgcccggtaag

SEQ ID NO: 31723 - RNA, 20 nt, African swine fever virus
  source 1..20: mol_type = genomic RNA
ccgttgccctatcatttacg

SEQ ID NO: 31724 - RNA, 20 nt, African swine fever virus
  source 1..20: mol_type = genomic RNA
gtcagggttgcgtcacagtt

SEQ ID NO: 31725 - RNA, 20 nt, African swine fever virus
  source 1..20: mol_type = genomic RNA
cggctatggtcaccgacaag

SEQ ID NO: 31726 - RNA, 20 nt, African swine fever virus
  source 1..20: mol_type = genomic RNA
cgaccattcctaagtcgcag

SEQ ID NO: 31727 - RNA, 20 nt, African swine fever virus
  source 1..20: mol_type = genomic RNA
gacctcgaccattcctaagt

SEQ ID NO: 31728 - RNA, 20 nt, African swine fever virus
  source 1..20: mol_type = genomic RNA
acaagatcaacctgacctcg

SEQ ID NO: 31729 - RNA, 20 nt, African swine fever virus
  source 1..20: mol_type = genomic RNA
agctcgatatggaccttatc

SEQ ID NO: 31730 - RNA, 20 nt, African swine fever virus
  source 1..20: mol_type = genomic RNA
gagctcgatatggaccttat

SEQ ID NO: 31731 - RNA, 20 nt, African swine fever virus
  source 1..20: mol_type = genomic RNA
tcgttcaccgctatgacaag

SEQ ID NO: 31732 - RNA, 20 nt, African swine fever virus
  source 1..20: mol_type = genomic RNA
gtcgcaagcaagctttgtta

SEQ ID NO: 31733 - RNA, 20 nt, African swine fever virus
  source 1..20: mol_type = genomic RNA
actttgagcgcaagggcatt

SEQ ID NO: 31734 - RNA, 20 nt, African swine fever virus
  source 1..20: mol_type = genomic RNA
aactttgagcgcaagggcat

SEQ ID NO: 31735 - RNA, 20 nt, African swine fever virus
  source 1..20: mol_type = genomic RNA
caagttatctgctctaatct

SEQ ID NO: 31736 - RNA, 20 nt, African swine fever virus
  source 1..20: mol_type = genomic RNA
ccaagttatctgctctaatc

SEQ ID NO: 31737 - RNA, 20 nt, African swine fever virus
  source 1..20: mol_type = genomic RNA
ctaggccacaagatccctct

SEQ ID NO: 31738 - RNA, 20 nt, African swine fever virus
  source 1..20: mol_type = genomic RNA
tctaggccacaagatccctc

SEQ ID NO: 31739 - RNA, 20 nt, African swine fever virus
  source 1..20: mol_type = genomic RNA
ggatggatgtcgtgttcact

SEQ ID NO: 31740 - RNA, 20 nt, African swine fever virus
  source 1..20: mol_type = genomic RNA
gggatggatgtcgtgttcac

SEQ ID NO: 31741 - RNA, 20 nt, African swine fever virus
  source 1..20: mol_type = genomic RNA
agttggcgcccgggatggat

SEQ ID NO: 31742 - RNA, 20 nt, African swine fever virus
  source 1..20: mol_type = genomic RNA
ccaagttggcgcccgggatg

SEQ ID NO: 31743 - RNA, 20 nt, African swine fever virus
  source 1..20: mol_type = genomic RNA
acacggacgccgacccggag

SEQ ID NO: 31744 - RNA, 20 nt, African swine fever virus
  source 1..20: mol_type = genomic RNA
tatgcacccgctagaagcca

SEQ ID NO: 31745 - RNA, 20 nt, African swine fever virus
  source 1..20: mol_type = genomic RNA
ttatgcacccgctagaagcc

SEQ ID NO: 31746 - RNA, 20 nt, African swine fever virus
  source 1..20: mol_type = genomic RNA
gacacaacctttcccttatg

SEQ ID NO: 31747 - RNA, 20 nt, African swine fever virus
  source 1..20: mol_type = genomic RNA
tcatcgaacgaacggcccga

SEQ ID NO: 31748 - RNA, 20 nt, African swine fever virus
  source 1..20: mol_type = genomic RNA
aacggcaagctcagcagaac

SEQ ID NO: 31749 - RNA, 20 nt, African swine fever virus
  source 1..20: mol_type = genomic RNA
gaacggcaagctcagcagaa

SEQ ID NO: 31750 - RNA, 20 nt, African swine fever virus
  source 1..20: mol_type = genomic RNA
cgactccttggcggacatcc

SEQ ID NO: 31751 - RNA, 20 nt, African swine fever virus
  source 1..20: mol_type = genomic RNA
acctcgactccttggcggac

SEQ ID NO: 31752 - RNA, 20 nt, African swine fever virus
  source 1..20: mol_type = genomic RNA
cgatagcaatgagaatagta

SEQ ID NO: 31753 - RNA, 20 nt, African swine fever virus
  source 1..20: mol_type = genomic RNA
ggttgtggagtgacttctgc

SEQ ID NO: 31754 - RNA, 20 nt, African swine fever virus
  source 1..20: mol_type = genomic RNA
gtttagaggtacctggttgt

SEQ ID NO: 31755 - RNA, 20 nt, African swine fever virus
  source 1..20: mol_type = genomic RNA
gccggtttagaggtacctgg

SEQ ID NO: 31756 - RNA, 20 nt, African swine fever virus
  source 1..20: mol_type = genomic RNA
gtgactggtttgcctgcact

SEQ ID NO: 31757 - RNA, 20 nt, African swine fever virus
  source 1..20: mol_type = genomic RNA
gtctgcccgtgactggtttg

SEQ ID NO: 31758 - RNA, 20 nt, African swine fever virus
  source 1..20: mol_type = genomic RNA
taactgggttgtccgtgact

SEQ ID NO: 31759 - RNA, 20 nt, African swine fever virus
  source 1..20: mol_type = genomic RNA
tgactagtctgtccgtaact

SEQ ID NO: 31760 - RNA, 20 nt, African swine fever virus
  source 1..20: mol_type = genomic RNA
ccagttgccatgactagtct

SEQ ID NO: 31761 - RNA, 20 nt, African swine fever virus
  source 1..20: mol_type = genomic RNA
gccagttgccatgactagtc

SEQ ID NO: 31762 - RNA, 20 nt, African swine fever virus
  source 1..20: mol_type = genomic RNA
ctggcccgccagttgccatg

SEQ ID NO: 31763 - RNA, 20 nt, African swine fever virus
  source 1..20: mol_type = genomic RNA
cctcttgggcctgcggattc

SEQ ID NO: 31764 - RNA, 20 nt, African swine fever virus
  source 1..20: mol_type = genomic RNA
tcgagagcccatctttgatg

SEQ ID NO: 31765 - RNA, 20 nt, African swine fever virus
  source 1..20: mol_type = genomic RNA
ccttcgagagcccatctttg

SEQ ID NO: 31766 - RNA, 20 nt, African swine fever virus
  source 1..20: mol_type = genomic RNA
taaggatgcttagaatggta

SEQ ID NO: 31767 - RNA, 20 nt, African swine fever virus
  source 1..20: mol_type = genomic RNA
tacaggttatctgcgaccat

SEQ ID NO: 31768 - RNA, 20 nt, African swine fever virus
  source 1..20: mol_type = genomic RNA
cgtacaggttatctgcgacc

SEQ ID NO: 31769 - RNA, 20 nt, African swine fever virus
  source 1..20: mol_type = genomic RNA
ccgagctactcttcttcttt

SEQ ID NO: 31770 - RNA, 20 nt, African swine fever virus
  source 1..20: mol_type = genomic RNA
aaggaactcccgggctatat

SEQ ID NO: 31771 - RNA, 20 nt, African swine fever virus
  source 1..20: mol_type = genomic RNA
gaaggaactcccgggctata

SEQ ID NO: 31772 - RNA, 20 nt, African swine fever virus
  source 1..20: mol_type = genomic RNA
gttgaaggcccgaaggaact

SEQ ID NO: 31773 - RNA, 20 nt, African swine fever virus
  source 1..20: mol_type = genomic RNA
gaattcatgccatgtataga

SEQ ID NO: 31774 - RNA, 20 nt, African swine fever virus
  source 1..20: mol_type = genomic RNA
aatatacccggaattcatgc

SEQ ID NO: 31775 - RNA, 20 nt, African swine fever virus
  source 1..20: mol_type = genomic RNA
taatatacccggaattcatg

SEQ ID NO: 31776 - RNA, 20 nt, African swine fever virus
  source 1..20: mol_type = genomic RNA
gcactcagaagtgagtgagc

SEQ ID NO: 31777 - RNA, 20 nt, African swine fever virus
  source 1..20: mol_type = genomic RNA
gttgcggtatacgatgccat

SEQ ID NO: 31778 - RNA, 20 nt, African swine fever virus
  source 1..20: mol_type = genomic RNA
aatgtgtgaaggcattggcg

SEQ ID NO: 31779 - RNA, 20 nt, African swine fever virus
  source 1..20: mol_type = genomic RNA
agcgtcaccgaatgtgtgaa

SEQ ID NO: 31780 - RNA, 20 nt, African swine fever virus
  source 1..20: mol_type = genomic RNA
tagcgtcaccgaatgtgtga

SEQ ID NO: 31781 - RNA, 20 nt, African swine fever virus
  source 1..20: mol_type = genomic RNA
ctagcgtcaccgaatgtgtg

SEQ ID NO: 31782 - RNA, 20 nt, African swine fever virus
  source 1..20: mol_type = genomic RNA
cctagcgtcaccgaatgtgt

SEQ ID NO: 31783 - RNA, 20 nt, African swine fever virus
  source 1..20: mol_type = genomic RNA
catgtcattatcggagcagc

SEQ ID NO: 31784 - RNA, 20 nt, African swine fever virus
  source 1..20: mol_type = genomic RNA
tgcgtcgccatttgctgcgg

SEQ ID NO: 31785 - RNA, 20 nt, African swine fever virus
  source 1..20: mol_type = genomic RNA
ccgtgcgtcgccatttgctg

SEQ ID NO: 31786 - RNA, 20 nt, African swine fever virus
  source 1..20: mol_type = genomic RNA
ttctcgcactggacgggcta

SEQ ID NO: 31787 - RNA, 20 nt, African swine fever virus
  source 1..20: mol_type = genomic RNA
ccattctcgcactggacggg

SEQ ID NO: 31788 - RNA, 20 nt, African swine fever virus
  source 1..20: mol_type = genomic RNA
taacggtgagcgccttaaga

SEQ ID NO: 31789 - RNA, 20 nt, African swine fever virus
  source 1..20: mol_type = genomic RNA
cgccgtaacggtgagcgcct

SEQ ID NO: 31790 - RNA, 20 nt, African swine fever virus
  source 1..20: mol_type = genomic RNA
gcgccgtaacggtgagcgcc

SEQ ID NO: 31791 - RNA, 20 nt, African swine fever virus
  source 1..20: mol_type = genomic RNA
ggcaatgcccgcgccgtaac

SEQ ID NO: 31792 - RNA, 20 nt, African swine fever virus
  source 1..20: mol_type = genomic RNA
aggcaatgcccgcgccgtaa

SEQ ID NO: 31793 - RNA, 20 nt, African swine fever virus
  source 1..20: mol_type = genomic RNA
gtcttatggctatgtgcttt

SEQ ID NO: 31794 - RNA, 20 nt, African swine fever virus
  source 1..20: mol_type = genomic RNA
gcagcgtgaaggcagtttcc

SEQ ID NO: 31795 - RNA, 20 nt, African swine fever virus
  source 1..20: mol_type = genomic RNA
tgcagcgtgaaggcagtttc

SEQ ID NO: 31796 - RNA, 20 nt, African swine fever virus
  source 1..20: mol_type = genomic RNA
aaccggtatttagatgtagg

SEQ ID NO: 31797 - RNA, 20 nt, African swine fever virus
  source 1..20: mol_type = genomic RNA
cgatgacgtcgtactctttg

SEQ ID NO: 31798 - RNA, 20 nt, African swine fever virus
  source 1..20: mol_type = genomic RNA
acgatgacgtcgtactcttt

SEQ ID NO: 31799 - RNA, 20 nt, African swine fever virus
  source 1..20: mol_type = genomic RNA
catctaacacgactagacca

SEQ ID NO: 31800 - RNA, 20 nt, African swine fever virus
  source 1..20: mol_type = genomic RNA
gcgagtgtaattcatgtgcc

SEQ ID NO: 31801 - RNA, 20 nt, African swine fever virus
  source 1..20: mol_type = genomic RNA
aatatccgactaagttgtat

SEQ ID NO: 31802 - RNA, 20 nt, African swine fever virus
  source 1..20: mol_type = genomic RNA
taccatcgggccggtccagg

SEQ ID NO: 31803 - RNA, 20 nt, African swine fever virus
  source 1..20: mol_type = genomic RNA
gatattcgatttccctcacg

SEQ ID NO: 31804 - RNA, 20 nt, African swine fever virus
  source 1..20: mol_type = genomic RNA
catttacgacaagttgtata

SEQ ID NO: 31805 - RNA, 20 nt, African swine fever virus
  source 1..20: mol_type = genomic RNA
atttgtgaggctcagcggta

SEQ ID NO: 31806 - RNA, 20 nt, African swine fever virus
  source 1..20: mol_type = genomic RNA
catttgtgaggctcagcggt

SEQ ID NO: 31807 - RNA, 20 nt, African swine fever virus
  source 1..20: mol_type = genomic RNA
ccatttgtgaggctcagcgg

SEQ ID NO: 31808 - RNA, 20 nt, African swine fever virus
  source 1..20: mol_type = genomic RNA
ccggaacgacaatttgaaca

SEQ ID NO: 31809 - RNA, 20 nt, African swine fever virus
  source 1..20: mol_type = genomic RNA
ccgcataggagcgccacctc

SEQ ID NO: 31810 - RNA, 20 nt, African swine fever virus
  source 1..20: mol_type = genomic RNA
gccgcataggagcgccacct

SEQ ID NO: 31811 - RNA, 20 nt, African swine fever virus
  source 1..20: mol_type = genomic RNA
taggtcagcaagataatgga

SEQ ID NO: 31812 - RNA, 20 nt, African swine fever virus
  source 1..20: mol_type = genomic RNA
ctacgcccgtagccataggt

SEQ ID NO: 31813 - RNA, 20 nt, African swine fever virus
  source 1..20: mol_type = genomic RNA
tgatgatcgatgtcatatgc

SEQ ID NO: 31814 - RNA, 20 nt, African swine fever virus
  source 1..20: mol_type = genomic RNA
gccgggtaatacgtcccaag

SEQ ID NO: 31815 - RNA, 20 nt, African swine fever virus
  source 1..20: mol_type = genomic RNA
tgccgggtaatacgtcccaa

SEQ ID NO: 31816 - RNA, 20 nt, African swine fever virus
  source 1..20: mol_type = genomic RNA
atccctgccgggtaatacgt

SEQ ID NO: 31817 - RNA, 20 nt, African swine fever virus
  source 1..20: mol_type = genomic RNA
gtgcctgtcgtagacctggc

SEQ ID NO: 31818 - RNA, 20 nt, African swine fever virus
  source 1..20: mol_type = genomic RNA
atctggtgatagatgaggag

SEQ ID NO: 31819 - RNA, 20 nt, African swine fever virus
  source 1..20: mol_type = genomic RNA
atgcccatctggtgatagat

SEQ ID NO: 31820 - RNA, 20 nt, African swine fever virus
  source 1..20: mol_type = genomic RNA
tgttgtaagcgtctagggac

SEQ ID NO: 31821 - RNA, 20 nt, African swine fever virus
  source 1..20: mol_type = genomic RNA
atgttgtaagcgtctaggga

SEQ ID NO: 31822 - RNA, 20 nt, African swine fever virus
  source 1..20: mol_type = genomic RNA
catgttgtaagcgtctaggg

SEQ ID NO: 31823 - RNA, 20 nt, African swine fever virus
  source 1..20: mol_type = genomic RNA
cccgcctttatgatctgctg

SEQ ID NO: 31824 - RNA, 20 nt, African swine fever virus
  source 1..20: mol_type = genomic RNA
cgtcaacgatgagcaggcaa

SEQ ID NO: 31825 - RNA, 20 nt, African swine fever virus
  source 1..20: mol_type = genomic RNA
ctaggcggtttagtagtttg

SEQ ID NO: 31826 - RNA, 20 nt, African swine fever virus
  source 1..20: mol_type = genomic RNA
actaggcggtttagtagttt

SEQ ID NO: 31827 - RNA, 20 nt, African swine fever virus
  source 1..20: mol_type = genomic RNA
gcgtagcttatcatacccac

SEQ ID NO: 31828 - RNA, 20 nt, African swine fever virus
  source 1..20: mol_type = genomic RNA
atactgctcgggtgacattt

SEQ ID NO: 31829 - RNA, 20 nt, African swine fever virus
  source 1..20: mol_type = genomic RNA
gcagatattgcctatactgc

SEQ ID NO: 31830 - RNA, 20 nt, African swine fever virus
  source 1..20: mol_type = genomic RNA
ttactgttagcatttcggac

SEQ ID NO: 31831 - RNA, 20 nt, African swine fever virus
  source 1..20: mol_type = genomic RNA
cgacgtgaaggcccaattcc

SEQ ID NO: 31832 - RNA, 20 nt, African swine fever virus
  source 1..20: mol_type = genomic RNA
gctggatcatgtcgcgctct

SEQ ID NO: 31833 - RNA, 20 nt, African swine fever virus
  source 1..20: mol_type = genomic RNA
tgtatattcagcggcgaatt

SEQ ID NO: 31834 - RNA, 20 nt, African swine fever virus
  source 1..20: mol_type = genomic RNA
ctccgtgtatattcagcggc

SEQ ID NO: 31835 - RNA, 20 nt, African swine fever virus
  source 1..20: mol_type = genomic RNA
tatttgagatccaatccctc

SEQ ID NO: 31836 - RNA, 20 nt, African swine fever virus
  source 1..20: mol_type = genomic RNA
cccgtatttgagatccaatc

SEQ ID NO: 31837 - RNA, 20 nt, African swine fever virus
  source 1..20: mol_type = genomic RNA
gccgcccgtatttgagatcc

SEQ ID NO: 31838 - RNA, 20 nt, African swine fever virus
  source 1..20: mol_type = genomic RNA
gtacggctctaggatatgaa

SEQ ID NO: 31839 - RNA, 20 nt, African swine fever virus
  source 1..20: mol_type = genomic RNA
agtacggctctaggatatga

SEQ ID NO: 31840 - RNA, 20 nt, African swine fever virus
  source 1..20: mol_type = genomic RNA
tatcccagtacggctctagg

SEQ ID NO: 31841 - RNA, 20 nt, African swine fever virus
  source 1..20: mol_type = genomic RNA
ctcgggccttatcccagtac

SEQ ID NO: 31842 - RNA, 20 nt, African swine fever virus
  source 1..20: mol_type = genomic RNA
atgcgtataatgcgcgcctt

SEQ ID NO: 31843 - RNA, 20 nt, African swine fever virus
  source 1..20: mol_type = genomic RNA
cgggcggtagcgcatcgtgg

SEQ ID NO: 31844 - RNA, 20 nt, African swine fever virus
  source 1..20: mol_type = genomic RNA
ttgaaggcacattcaatggc

SEQ ID NO: 31845 - RNA, 20 nt, African swine fever virus
  source 1..20: mol_type = genomic RNA
ctttcgccgttgaaggcaca

SEQ ID NO: 31846 - RNA, 20 nt, African swine fever virus
  source 1..20: mol_type = genomic RNA
cgtaggatatgctataggct

SEQ ID NO: 31847 - RNA, 20 nt, African swine fever virus
  source 1..20: mol_type = genomic RNA
tcgtaggatatgctataggc

SEQ ID NO: 31848 - RNA, 20 nt, African swine fever virus
  source 1..20: mol_type = genomic RNA
taatgatgggattatattcg

SEQ ID NO: 31849 - RNA, 20 nt, African swine fever virus
  source 1..20: mol_type = genomic RNA
aagtcaatgaccttaatgat

SEQ ID NO: 31850 - RNA, 20 nt, African swine fever virus
  source 1..20: mol_type = genomic RNA
tacctatcgtccacacagtt

SEQ ID NO: 31851 - RNA, 20 nt, African swine fever virus
  source 1..20: mol_type = genomic RNA
cgaccatacctatcgtccac

SEQ ID NO: 31852 - RNA, 20 nt, African swine fever virus
  source 1..20: mol_type = genomic RNA
aacaacgggtgaccgtgttt

SEQ ID NO: 31853 - RNA, 20 nt, African swine fever virus
  source 1..20: mol_type = genomic RNA
caacctaacaacgggtgacc

SEQ ID NO: 31854 - RNA, 20 nt, African swine fever virus
  source 1..20: mol_type = genomic RNA
tgtggatagcctctccaatc

SEQ ID NO: 31855 - RNA, 20 nt, African swine fever virus
  source 1..20: mol_type = genomic RNA
ttagatactctttcggtcca

SEQ ID NO: 31856 - RNA, 20 nt, African swine fever virus
  source 1..20: mol_type = genomic RNA
attagatactctttcggtcc

SEQ ID NO: 31857 - RNA, 20 nt, African swine fever virus
  source 1..20: mol_type = genomic RNA
agtagagcttcttcctgtga

SEQ ID NO: 31858 - RNA, 20 nt, African swine fever virus
  source 1..20: mol_type = genomic RNA
aaccaagtagagcttcttcc

SEQ ID NO: 31859 - RNA, 20 nt, African swine fever virus
  source 1..20: mol_type = genomic RNA
cttcgagttcaaggttgttc

SEQ ID NO: 31860 - RNA, 20 nt, African swine fever virus
  source 1..20: mol_type = genomic RNA
accttcacggcactgccgag

SEQ ID NO: 31861 - RNA, 20 nt, African swine fever virus
  source 1..20: mol_type = genomic RNA
ttaagatactgtggcccgac

SEQ ID NO: 31862 - RNA, 20 nt, African swine fever virus
  source 1..20: mol_type = genomic RNA
gttaagatactgtggcccga

SEQ ID NO: 31863 - RNA, 20 nt, African swine fever virus
  source 1..20: mol_type = genomic RNA
tatggtgcgtctaagtattg

SEQ ID NO: 31864 - RNA, 20 nt, African swine fever virus
  source 1..20: mol_type = genomic RNA
ggatgggctgcatcgtccta

SEQ ID NO: 31865 - RNA, 20 nt, African swine fever virus
  source 1..20: mol_type = genomic RNA
tgtggcggtggatgcacgcc

SEQ ID NO: 31866 - RNA, 20 nt, African swine fever virus
  source 1..20: mol_type = genomic RNA
atggaacaatctcataccta

SEQ ID NO: 31867 - RNA, 20 nt, African swine fever virus
  source 1..20: mol_type = genomic RNA
gatggaacaatctcatacct

SEQ ID NO: 31868 - RNA, 20 nt, African swine fever virus
  source 1..20: mol_type = genomic RNA
cccgatggaacaatctcata

SEQ ID NO: 31869 - RNA, 20 nt, African swine fever virus
  source 1..20: mol_type = genomic RNA
atccctcccgatggaacaat

SEQ ID NO: 31870 - RNA, 20 nt, African swine fever virus
  source 1..20: mol_type = genomic RNA
tatccctcccgatggaacaa

SEQ ID NO: 31871 - RNA, 20 nt, African swine fever virus
  source 1..20: mol_type = genomic RNA
gttgcggcatcaaggagata

SEQ ID NO: 31872 - RNA, 20 nt, African swine fever virus
  source 1..20: mol_type = genomic RNA
agttgcggcatcaaggagat

SEQ ID NO: 31873 - RNA, 20 nt, African swine fever virus
  source 1..20: mol_type = genomic RNA
ttcccagttgcggcatcaag

SEQ ID NO: 31874 - RNA, 20 nt, African swine fever virus
  source 1..20: mol_type = genomic RNA
gggcgcttaacatcgaatgt

SEQ ID NO: 31875 - RNA, 20 nt, African swine fever virus
  source 1..20: mol_type = genomic RNA
ttgtggtctcaacatcgcat

SEQ ID NO: 31876 - RNA, 20 nt, African swine fever virus
  source 1..20: mol_type = genomic RNA
aacaacacgggcttgatata

SEQ ID NO: 31877 - RNA, 20 nt, African swine fever virus
  source 1..20: mol_type = genomic RNA
ttctcgctggcgcatcttga

SEQ ID NO: 31878 - RNA, 20 nt, African swine fever virus
  source 1..20: mol_type = genomic RNA
gttctcgctggcgcatcttg

SEQ ID NO: 31879 - RNA, 20 nt, African swine fever virus
  source 1..20: mol_type = genomic RNA
catagcgagcccgttctcgc

SEQ ID NO: 31880 - RNA, 20 nt, African swine fever virus
  source 1..20: mol_type = genomic RNA
accagtggctggcgcctgaa

SEQ ID NO: 31881 - RNA, 20 nt, African swine fever virus
  source 1..20: mol_type = genomic RNA
taccagtggctggcgcctga

SEQ ID NO: 31882 - RNA, 20 nt, African swine fever virus
  source 1..20: mol_type = genomic RNA
cgacatgatcgccaccaggc

SEQ ID NO: 31883 - RNA, 20 nt, African swine fever virus
  source 1..20: mol_type = genomic RNA
tcatcaagtattaccgcgac

SEQ ID NO: 31884 - RNA, 20 nt, African swine fever virus
  source 1..20: mol_type = genomic RNA
accagtttagaaccatcatc

SEQ ID NO: 31885 - RNA, 20 nt, African swine fever virus
  source 1..20: mol_type = genomic RNA
cgcatttcctaccagtttag

SEQ ID NO: 31886 - RNA, 20 nt, African swine fever virus
  source 1..20: mol_type = genomic RNA
agaacatatcaccacgcatt

SEQ ID NO: 31887 - RNA, 20 nt, African swine fever virus
  source 1..20: mol_type = genomic RNA
atcctcggtgagccagatta

SEQ ID NO: 31888 - RNA, 20 nt, African swine fever virus
  source 1..20: mol_type = genomic RNA
gacatcgacgtagaagacct

SEQ ID NO: 31889 - RNA, 20 nt, African swine fever virus
  source 1..20: mol_type = genomic RNA
tctcgattccagacatcgac

SEQ ID NO: 31890 - RNA, 20 nt, African swine fever virus
  source 1..20: mol_type = genomic RNA
aggagtgtacaatgccatct

SEQ ID NO: 31891 - RNA, 20 nt, African swine fever virus
  source 1..20: mol_type = genomic RNA
ttcccaacttcgaggaccta

SEQ ID NO: 31892 - RNA, 20 nt, African swine fever virus
  source 1..20: mol_type = genomic RNA
attcccaacttcgaggacct

SEQ ID NO: 31893 - RNA, 20 nt, African swine fever virus
  source 1..20: mol_type = genomic RNA
cattcccaacttcgaggacc

SEQ ID NO: 31894 - RNA, 20 nt, African swine fever virus
  source 1..20: mol_type = genomic RNA
ccattcccaacttcgaggac

SEQ ID NO: 31895 - RNA, 20 nt, African swine fever virus
  source 1..20: mol_type = genomic RNA
gaagacgaattagaacagta

SEQ ID NO: 31896 - RNA, 20 nt, African swine fever virus
  source 1..20: mol_type = genomic RNA
cgcataatgagtacaccttt

SEQ ID NO: 31897 - RNA, 20 nt, African swine fever virus
  source 1..20: mol_type = genomic RNA
gcgcataatgagtacacctt

SEQ ID NO: 31898 - RNA, 20 nt, African swine fever virus
  source 1..20: mol_type = genomic RNA
atgagtatgataggtccgta

SEQ ID NO: 31899 - RNA, 20 nt, African swine fever virus
  source 1..20: mol_type = genomic RNA
tgccgatgagtatgataggt

SEQ ID NO: 31900 - RNA, 20 nt, African swine fever virus
  source 1..20: mol_type = genomic RNA
tccatgccgatgagtatgat

SEQ ID NO: 31901 - RNA, 20 nt, African swine fever virus
  source 1..20: mol_type = genomic RNA
cctattggtatcaccacatt

SEQ ID NO: 31902 - RNA, 20 nt, African swine fever virus
  source 1..20: mol_type = genomic RNA
acctattggtatcaccacat

SEQ ID NO: 31903 - RNA, 20 nt, African swine fever virus
  source 1..20: mol_type = genomic RNA
gggaatgatgatcagccata

SEQ ID NO: 31904 - RNA, 20 nt, African swine fever virus
  source 1..20: mol_type = genomic RNA
tgatgccgtatcaacagccc

SEQ ID NO: 31905 - RNA, 20 nt, African swine fever virus
  source 1..20: mol_type = genomic RNA
atgatgccgtatcaacagcc

SEQ ID NO: 31906 - RNA, 20 nt, African swine fever virus
  source 1..20: mol_type = genomic RNA
cggacgaacagcccatgatg

SEQ ID NO: 31907 - RNA, 20 nt, African swine fever virus
  source 1..20: mol_type = genomic RNA
tatcaacaatcctcggacga

SEQ ID NO: 31908 - RNA, 20 nt, African swine fever virus
  source 1..20: mol_type = genomic RNA
attattgccgtatcaacaat

SEQ ID NO: 31909 - RNA, 20 nt, African swine fever virus
  source 1..20: mol_type = genomic RNA
tgcacccattattgccgtat

SEQ ID NO: 31910 - RNA, 20 nt, African swine fever virus
  source 1..20: mol_type = genomic RNA
atgcacccattattgccgta

SEQ ID NO: 31911 - RNA, 20 nt, African swine fever virus
  source 1..20: mol_type = genomic RNA
ccgcgtgagcagcccatgca

SEQ ID NO: 31912 - RNA, 20 nt, African swine fever virus
  source 1..20: mol_type = genomic RNA
ttctcattacgccgcagcag

SEQ ID NO: 31913 - RNA, 20 nt, African swine fever virus
  source 1..20: mol_type = genomic RNA
tgcggcgtttaaccagcagt

SEQ ID NO: 31914 - RNA, 20 nt, African swine fever virus
  source 1..20: mol_type = genomic RNA
tagatgtgctacggtttgta

SEQ ID NO: 31915 - RNA, 20 nt, African swine fever virus
  source 1..20: mol_type = genomic RNA
cggctctgctaatgccctta

SEQ ID NO: 31916 - RNA, 20 nt, African swine fever virus
  source 1..20: mol_type = genomic RNA
tgcaccgcggctctgctaat

SEQ ID NO: 31917 - RNA, 20 nt, African swine fever virus
  source 1..20: mol_type = genomic RNA
cgacaggccgtgcaccgcgg

SEQ ID NO: 31918 - RNA, 20 nt, African swine fever virus
  source 1..20: mol_type = genomic RNA
gcgacaggccgtgcaccgcg

SEQ ID NO: 31919 - RNA, 20 nt, African swine fever virus
  source 1..20: mol_type = genomic RNA
accgggcttaatatctagca

SEQ ID NO: 31920 - RNA, 20 nt, African swine fever virus
  source 1..20: mol_type = genomic RNA
cgatcttatacccaccgggc

SEQ ID NO: 31921 - RNA, 20 nt, African swine fever virus
  source 1..20: mol_type = genomic RNA
tggaatcctcgatcttatac

SEQ ID NO: 31922 - RNA, 20 nt, African swine fever virus
  source 1..20: mol_type = genomic RNA
gaatgagatcgcggctatag

SEQ ID NO: 31923 - RNA, 20 nt, African swine fever virus
  source 1..20: mol_type = genomic RNA
cctgaatgagatcgcggcta

SEQ ID NO: 31924 - RNA, 20 nt, African swine fever virus
  source 1..20: mol_type = genomic RNA
gccacctgaatgagatcgcg

SEQ ID NO: 31925 - RNA, 20 nt, African swine fever virus
  source 1..20: mol_type = genomic RNA
ggttgtaggaagccaatctc

SEQ ID NO: 31926 - RNA, 20 nt, African swine fever virus
  source 1..20: mol_type = genomic RNA
ggcggtggtgacgcgggtct

SEQ ID NO: 31927 - RNA, 20 nt, African swine fever virus
  source 1..20: mol_type = genomic RNA
gattgatatgtggcagcggc

SEQ ID NO: 31928 - RNA, 20 nt, African swine fever virus
  source 1..20: mol_type = genomic RNA
ataatgatccggcaggcgtt

SEQ ID NO: 31929 - RNA, 20 nt, African swine fever virus
  source 1..20: mol_type = genomic RNA
atagtatgagtttcatcctt

SEQ ID NO: 31930 - RNA, 20 nt, African swine fever virus
  source 1..20: mol_type = genomic RNA
tatgaataattgttaatacc

SEQ ID NO: 31931 - RNA, 20 nt, African swine fever virus
  source 1..20: mol_type = genomic RNA
gcgccagcgtatggctggag

SEQ ID NO: 31932 - RNA, 20 nt, African swine fever virus
  source 1..20: mol_type = genomic RNA
ggcgccagcgtatggctgga

SEQ ID NO: 31933 - RNA, 20 nt, African swine fever virus
  source 1..20: mol_type = genomic RNA
ttcccggcgccagcgtatgg

SEQ ID NO: 31934 - RNA, 20 nt, African swine fever virus
  source 1..20: mol_type = genomic RNA
tttcccggcgccagcgtatg

SEQ ID NO: 31935 - RNA, 20 nt, African swine fever virus
  source 1..20: mol_type = genomic RNA
ctatagaggaactcaatcaa

SEQ ID NO: 31936 - RNA, 20 nt, African swine fever virus
  source 1..20: mol_type = genomic RNA
tgagtttgcctctatagagg

SEQ ID NO: 31937 - RNA, 20 nt, African swine fever virus
  source 1..20: mol_type = genomic RNA
ctgagtttgcctctatagag

SEQ ID NO: 31938 - RNA, 20 nt, African swine fever virus
  source 1..20: mol_type = genomic RNA
gctgaaccacacgctgatca

SEQ ID NO: 31939 - RNA, 20 nt, African swine fever virus
  source 1..20: mol_type = genomic RNA
cgctgaaccacacgctgatc

SEQ ID NO: 31940 - RNA, 20 nt, African swine fever virus
  source 1..20: mol_type = genomic RNA
tacaggcgtgagctttacca

SEQ ID NO: 31941 - RNA, 20 nt, African swine fever virus
  source 1..20: mol_type = genomic RNA
gcgcaattgtttacattcgc

SEQ ID NO: 31942 - RNA, 20 nt, African swine fever virus
  source 1..20: mol_type = genomic RNA
aatagtctcaaccgtatcgt

SEQ ID NO: 31943 - RNA, 20 nt, African swine fever virus
  source 1..20: mol_type = genomic RNA
ctgcgtgttcctacggttgc

SEQ ID NO: 31944 - RNA, 20 nt, African swine fever virus
  source 1..20: mol_type = genomic RNA
atactactacagctacggca

SEQ ID NO: 31945 - RNA, 20 nt, African swine fever virus
  source 1..20: mol_type = genomic RNA
ccaattacaatttcaagggc

SEQ ID NO: 31946 - RNA, 20 nt, African swine fever virus
  source 1..20: mol_type = genomic RNA
gctgcggccctccaattaca

SEQ ID NO: 31947 - RNA, 20 nt, African swine fever virus
  source 1..20: mol_type = genomic RNA
tggtgagggcctacgtcgac

SEQ ID NO: 31948 - RNA, 20 nt, African swine fever virus
  source 1..20: mol_type = genomic RNA
tcggagggctggaagtacac

SEQ ID NO: 31949 - RNA, 20 nt, African swine fever virus
  source 1..20: mol_type = genomic RNA
atcggagggctggaagtaca

SEQ ID NO: 31950 - RNA, 20 nt, African swine fever virus
  source 1..20: mol_type = genomic RNA
gtattgccgcttgctattat

SEQ ID NO: 31951 - RNA, 20 nt, African swine fever virus
  source 1..20: mol_type = genomic RNA
gagtactacgtgcctgtatt

SEQ ID NO: 31952 - RNA, 20 nt, African swine fever virus
  source 1..20: mol_type = genomic RNA
gcgggcggaaccagagtact

SEQ ID NO: 31953 - RNA, 20 nt, African swine fever virus
  source 1..20: mol_type = genomic RNA
acgtctttgaggacggccag

SEQ ID NO: 31954 - RNA, 20 nt, African swine fever virus
  source 1..20: mol_type = genomic RNA
tacgtctttgaggacggcca

SEQ ID NO: 31955 - RNA, 20 nt, African swine fever virus
  source 1..20: mol_type = genomic RNA
ctacgtctttgaggacggcc

SEQ ID NO: 31956 - RNA, 20 nt, African swine fever virus
  source 1..20: mol_type = genomic RNA
cggaggactcatggcttctc

SEQ ID NO: 31957 - RNA, 20 nt, African swine fever virus
  source 1..20: mol_type = genomic RNA
gcggaggactcatggcttct

SEQ ID NO: 31958 - RNA, 20 nt, African swine fever virus
  source 1..20: mol_type = genomic RNA
gtattcataggcataggaag

SEQ ID NO: 31959 - RNA, 20 nt, African swine fever virus
  source 1..20: mol_type = genomic RNA
ctatccagtattcataggca

SEQ ID NO: 31960 - RNA, 20 nt, African swine fever virus
  source 1..20: mol_type = genomic RNA
cccagtattacccgggctcc

SEQ ID NO: 31961 - RNA, 20 nt, African swine fever virus
  source 1..20: mol_type = genomic RNA
acttcttagacggaatgacg

SEQ ID NO: 31962 - RNA, 20 nt, African swine fever virus
  source 1..20: mol_type = genomic RNA
tcgagcggcagattcccaac

SEQ ID NO: 31963 - RNA, 20 nt, African swine fever virus
  source 1..20: mol_type = genomic RNA
aggcttacaagctggatgcc

SEQ ID NO: 31964 - RNA, 20 nt, African swine fever virus
  source 1..20: mol_type = genomic RNA
ttcatagtgtccgacgaatt

SEQ ID NO: 31965 - RNA, 20 nt, African swine fever virus
  source 1..20: mol_type = genomic RNA
gacgcagtccattcatagtg

SEQ ID NO: 31966 - RNA, 20 nt, African swine fever virus
  source 1..20: mol_type = genomic RNA
gcgtggtgccgctcactgaa

SEQ ID NO: 31967 - RNA, 20 nt, African swine fever virus
  source 1..20: mol_type = genomic RNA
gcttagtcaatcatactgta

SEQ ID NO: 31968 - RNA, 20 nt, African swine fever virus
  source 1..20: mol_type = genomic RNA
cgctgatacgtgtgtacgaa

SEQ ID NO: 31969 - RNA, 20 nt, African swine fever virus
  source 1..20: mol_type = genomic RNA
tcatggtgcgcaacgaacag

SEQ ID NO: 31970 - RNA, 20 nt, African swine fever virus
  source 1..20: mol_type = genomic RNA
ttgacttctgcggcatgatc

SEQ ID NO: 31971 - RNA, 20 nt, African swine fever virus
  source 1..20: mol_type = genomic RNA
agcgggccctcctttgactt

SEQ ID NO: 31972 - RNA, 20 nt, African swine fever virus
  source 1..20: mol_type = genomic RNA
aagcgggccctcctttgact

SEQ ID NO: 31973 - RNA, 20 nt, African swine fever virus
  source 1..20: mol_type = genomic RNA
gttgcgcacgggactgaccc

SEQ ID NO: 31974 - RNA, 20 nt, African swine fever virus
  source 1..20: mol_type = genomic RNA
tgttgcgcacgggactgacc

SEQ ID NO: 31975 - RNA, 20 nt, African swine fever virus
  source 1..20: mol_type = genomic RNA
gcggaaggatgaacttagca

SEQ ID NO: 31976 - RNA, 20 nt, African swine fever virus
  source 1..20: mol_type = genomic RNA
gccagcggaaggatgaactt

SEQ ID NO: 31977 - RNA, 20 nt, African swine fever virus
  source 1..20: mol_type = genomic RNA
ggcatagaatggaccggcca

SEQ ID NO: 31978 - RNA, 20 nt, African swine fever virus
  source 1..20: mol_type = genomic RNA
ctgcaggttgcggcggtcgt

SEQ ID NO: 31979 - RNA, 20 nt, African swine fever virus
  source 1..20: mol_type = genomic RNA
tctgcaggttgcggcggtcg

SEQ ID NO: 31980 - RNA, 20 nt, African swine fever virus
  source 1..20: mol_type = genomic RNA
tatagcctgcaccctctgca

SEQ ID NO: 31981 - RNA, 20 nt, African swine fever virus
  source 1..20: mol_type = genomic RNA
aatagcacgatacatacggc

SEQ ID NO: 31982 - RNA, 20 nt, African swine fever virus
  source 1..20: mol_type = genomic RNA
gttgagcgcgcctaatagca

SEQ ID NO: 31983 - RNA, 20 nt, African swine fever virus
  source 1..20: mol_type = genomic RNA
tgttgagcgcgcctaatagc

SEQ ID NO: 31984 - RNA, 20 nt, African swine fever virus
  source 1..20: mol_type = genomic RNA
ccatttattacaatgataag

SEQ ID NO: 31985 - RNA, 20 nt, African swine fever virus
  source 1..20: mol_type = genomic RNA
atgcgcggcctacgtgggaa

SEQ ID NO: 31986 - RNA, 20 nt, African swine fever virus
  source 1..20: mol_type = genomic RNA
gccaatgcgcggcctacgtg

SEQ ID NO: 31987 - RNA, 20 nt, African swine fever virus
  source 1..20: mol_type = genomic RNA
ggatttatcttcgcgcctgc

SEQ ID NO: 31988 - RNA, 20 nt, African swine fever virus
  source 1..20: mol_type = genomic RNA
cctggatttatcttcgcgcc

SEQ ID NO: 31989 - RNA, 20 nt, African swine fever virus
  source 1..20: mol_type = genomic RNA
ggaactagggtacgcggagc

SEQ ID NO: 31990 - RNA, 20 nt, African swine fever virus
  source 1..20: mol_type = genomic RNA
gtataccaggaactagggta

SEQ ID NO: 31991 - RNA, 20 nt, African swine fever virus
  source 1..20: mol_type = genomic RNA
gcgcctagatatcattgagc

SEQ ID NO: 31992 - RNA, 20 nt, African swine fever virus
  source 1..20: mol_type = genomic RNA
ttcttaccaccgccgacggc

SEQ ID NO: 31993 - RNA, 20 nt, African swine fever virus
  source 1..20: mol_type = genomic RNA
tggtgcattcgcagtgggcc

SEQ ID NO: 31994 - RNA, 20 nt, African swine fever virus
  source 1..20: mol_type = genomic RNA
acggcgtcgggctgaagctc

SEQ ID NO: 31995 - RNA, 20 nt, African swine fever virus
  source 1..20: mol_type = genomic RNA
gaacgaacatcaataaggcc

SEQ ID NO: 31996 - RNA, 20 nt, African swine fever virus
  source 1..20: mol_type = genomic RNA
agcgcgatgtgtatgttccc

SEQ ID NO: 31997 - RNA, 20 nt, African swine fever virus
  source 1..20: mol_type = genomic RNA
gtcttatcgccaagcgcgat

SEQ ID NO: 31998 - RNA, 20 nt, African swine fever virus
  source 1..20: mol_type = genomic RNA
aagatgaggaccttatggcg

SEQ ID NO: 31999 - RNA, 20 nt, African swine fever virus
  source 1..20: mol_type = genomic RNA
acgaagacatgtataagttt

SEQ ID NO: 32000 - RNA, 20 nt, African swine fever virus
  source 1..20: mol_type = genomic RNA
ctaggattaccgacgaagac

SEQ ID NO: 32001 - RNA, 20 nt, African swine fever virus
  source 1..20: mol_type = genomic RNA
cgacaacgtgtcatacgccc

SEQ ID NO: 32002 - RNA, 20 nt, African swine fever virus
  source 1..20: mol_type = genomic RNA
acattcgtcaccagcggtcg

SEQ ID NO: 32003 - RNA, 20 nt, African swine fever virus
  source 1..20: mol_type = genomic RNA
ttattcgctggatggaacgg

SEQ ID NO: 32004 - RNA, 20 nt, African swine fever virus
  source 1..20: mol_type = genomic RNA
gttattcgctggatggaacg

SEQ ID NO: 32005 - RNA, 20 nt, African swine fever virus
  source 1..20: mol_type = genomic RNA
ggtcccgttattcgctggat

SEQ ID NO: 32006 - RNA, 20 nt, African swine fever virus
  source 1..20: mol_type = genomic RNA
aggtcccgttattcgctgga

SEQ ID NO: 32007 - RNA, 20 nt, African swine fever virus
  source 1..20: mol_type = genomic RNA
ccaggtcccgttattcgctg

SEQ ID NO: 32008 - RNA, 20 nt, African swine fever virus
  source 1..20: mol_type = genomic RNA
cccaggtcccgttattcgct

SEQ ID NO: 32009 - RNA, 20 nt, African swine fever virus
  source 1..20: mol_type = genomic RNA
tgtaacaccttcggatgcgt

SEQ ID NO: 32010 - RNA, 20 nt, African swine fever virus
  source 1..20: mol_type = genomic RNA
tgaaggcctatgcgcaacaa

SEQ ID NO: 32011 - RNA, 20 nt, African swine fever virus
  source 1..20: mol_type = genomic RNA
ccgtgaaggcctatgcgcaa

SEQ ID NO: 32012 - RNA, 20 nt, African swine fever virus
  source 1..20: mol_type = genomic RNA
gccgtgaaggcctatgcgca

SEQ ID NO: 32013 - RNA, 20 nt, African swine fever virus
  source 1..20: mol_type = genomic RNA
cgccgtgaaggcctatgcgc

SEQ ID NO: 32014 - RNA, 20 nt, African swine fever virus
  source 1..20: mol_type = genomic RNA
cgcctccgaccacaacagac

SEQ ID NO: 32015 - RNA, 20 nt, African swine fever virus
  source 1..20: mol_type = genomic RNA
agttattcagagagtactcc

SEQ ID NO: 32016 - RNA, 20 nt, African swine fever virus
  source 1..20: mol_type = genomic RNA
cgggcatgatgtattcgcag

SEQ ID NO: 32017 - RNA, 20 nt, African swine fever virus
  source 1..20: mol_type = genomic RNA
cgtggtggatcatgtctgcc

SEQ ID NO: 32018 - RNA, 20 nt, African swine fever virus
  source 1..20: mol_type = genomic RNA
attggcgaatatgtttaagc

SEQ ID NO: 32019 - RNA, 20 nt, African swine fever virus
  source 1..20: mol_type = genomic RNA
gagtgcgacgaatagcatgc

SEQ ID NO: 32020 - RNA, 20 nt, African swine fever virus
  source 1..20: mol_type = genomic RNA
cctgagtgcgacgaatagca

SEQ ID NO: 32021 - RNA, 20 nt, African swine fever virus
  source 1..20: mol_type = genomic RNA
acctgagtgcgacgaatagc

SEQ ID NO: 32022 - RNA, 20 nt, African swine fever virus
  source 1..20: mol_type = genomic RNA
cccacctgagtgcgacgaat

SEQ ID NO: 32023 - RNA, 20 nt, African swine fever virus
  source 1..20: mol_type = genomic RNA
gctacaagcagcgcggttca

SEQ ID NO: 32024 - RNA, 20 nt, African swine fever virus
  source 1..20: mol_type = genomic RNA
agctacaagcagcgcggttc

SEQ ID NO: 32025 - RNA, 20 nt, African swine fever virus
  source 1..20: mol_type = genomic RNA
ggactgttgagtgtatccca

SEQ ID NO: 32026 - RNA, 20 nt, African swine fever virus
  source 1..20: mol_type = genomic RNA
gattgtatttgcggcatata

SEQ ID NO: 32027 - RNA, 20 nt, African swine fever virus
  source 1..20: mol_type = genomic RNA
cgacgtagatgcccatagag

SEQ ID NO: 32028 - RNA, 20 nt, African swine fever virus
  source 1..20: mol_type = genomic RNA
agctgatgaatgccgcacac

SEQ ID NO: 32029 - RNA, 20 nt, African swine fever virus
  source 1..20: mol_type = genomic RNA
ggcaagcgggagcatggact

SEQ ID NO: 32030 - RNA, 20 nt, African swine fever virus
  source 1..20: mol_type = genomic RNA
gtgtagagcagatcgtgatg

SEQ ID NO: 32031 - RNA, 20 nt, African swine fever virus
  source 1..20: mol_type = genomic RNA
catttggcatttcgggacac

SEQ ID NO: 32032 - RNA, 20 nt, African swine fever virus
  source 1..20: mol_type = genomic RNA
tgggagatggcgaggcttta

SEQ ID NO: 32033 - RNA, 20 nt, African swine fever virus
  source 1..20: mol_type = genomic RNA
cagagacagctatgcacgct

SEQ ID NO: 32034 - RNA, 20 nt, African swine fever virus
  source 1..20: mol_type = genomic RNA
gttctgcattaacattccca

SEQ ID NO: 32035 - RNA, 20 nt, African swine fever virus
  source 1..20: mol_type = genomic RNA
cctgttctgcattaacattc

SEQ ID NO: 32036 - RNA, 20 nt, African swine fever virus
  source 1..20: mol_type = genomic RNA
cggaggcgacatgagaacgc

SEQ ID NO: 32037 - RNA, 20 nt, African swine fever virus
  source 1..20: mol_type = genomic RNA
cgcgggttgacaggttatga

SEQ ID NO: 32038 - RNA, 20 nt, African swine fever virus
  source 1..20: mol_type = genomic RNA
tcgcgggttgacaggttatg

SEQ ID NO: 32039 - RNA, 20 nt, African swine fever virus
  source 1..20: mol_type = genomic RNA
ggatatctggcgatcgtatg

SEQ ID NO: 32040 - RNA, 20 nt, African swine fever virus
  source 1..20: mol_type = genomic RNA
agaagaatcgcagttgttcc

SEQ ID NO: 32041 - RNA, 20 nt, African swine fever virus
  source 1..20: mol_type = genomic RNA
ttcttcgcgccaactgctgc

SEQ ID NO: 32042 - RNA, 20 nt, African swine fever virus
  source 1..20: mol_type = genomic RNA
tcccggtctgccagtttaat

SEQ ID NO: 32043 - RNA, 20 nt, African swine fever virus
  source 1..20: mol_type = genomic RNA
gtgtagctcagcgacctcct

SEQ ID NO: 32044 - RNA, 20 nt, African swine fever virus
  source 1..20: mol_type = genomic RNA
tgattcaaccgacgtggtgc

SEQ ID NO: 32045 - RNA, 20 nt, African swine fever virus
  source 1..20: mol_type = genomic RNA
atttagatgccgtgattcaa

SEQ ID NO: 32046 - RNA, 20 nt, African swine fever virus
  source 1..20: mol_type = genomic RNA
tttgtctcggcctcgctgat

SEQ ID NO: 32047 - RNA, 20 nt, African swine fever virus
  source 1..20: mol_type = genomic RNA
ggatgaggccgtttgtctcg

SEQ ID NO: 32048 - RNA, 20 nt, African swine fever virus
  source 1..20: mol_type = genomic RNA
gttacgggcgttgccgacat

SEQ ID NO: 32049 - RNA, 20 nt, African swine fever virus
  source 1..20: mol_type = genomic RNA
ggttacgggcgttgccgaca

SEQ ID NO: 32050 - RNA, 20 nt, African swine fever virus
  source 1..20: mol_type = genomic RNA
ttgggcagctcatgccgcgg

SEQ ID NO: 32051 - RNA, 20 nt, African swine fever virus
  source 1..20: mol_type = genomic RNA
tttaacggaatgcccactgc

SEQ ID NO: 32052 - RNA, 20 nt, African swine fever virus
  source 1..20: mol_type = genomic RNA
tccggtgctgagtctttcca

SEQ ID NO: 32053 - RNA, 20 nt, African swine fever virus
  source 1..20: mol_type = genomic RNA
ttccggtgctgagtctttcc

SEQ ID NO: 32054 - RNA, 20 nt, African swine fever virus
  source 1..20: mol_type = genomic RNA
taagccttgggttccgtttg

SEQ ID NO: 32055 - RNA, 20 nt, African swine fever virus
  source 1..20: mol_type = genomic RNA
gaagccagtctgtgcttgcc

SEQ ID NO: 32056 - RNA, 20 nt, African swine fever virus
  source 1..20: mol_type = genomic RNA
agatgtgcgttggtggctgc

SEQ ID NO: 32057 - RNA, 20 nt, African swine fever virus
  source 1..20: mol_type = genomic RNA
gagatgtgcgttggtggctg

SEQ ID NO: 32058 - RNA, 20 nt, African swine fever virus
  source 1..20: mol_type = genomic RNA
atcccgagatgtgcgttggt

SEQ ID NO: 32059 - RNA, 20 nt, African swine fever virus
  source 1..20: mol_type = genomic RNA
ggccttgccgaataatggaa

SEQ ID NO: 32060 - RNA, 20 nt, African swine fever virus
  source 1..20: mol_type = genomic RNA
cggccttgccgaataatgga

SEQ ID NO: 32061 - RNA, 20 nt, African swine fever virus
  source 1..20: mol_type = genomic RNA
ccggccttgccgaataatgg

SEQ ID NO: 32062 - RNA, 20 nt, African swine fever virus
  source 1..20: mol_type = genomic RNA
acatgcggacccgattgtgg

SEQ ID NO: 32063 - RNA, 20 nt, African swine fever virus
  source 1..20: mol_type = genomic RNA
gacatgcggacccgattgtg

SEQ ID NO: 32064 - RNA, 20 nt, African swine fever virus
  source 1..20: mol_type = genomic RNA
cgacatgcggacccgattgt

SEQ ID NO: 32065 - RNA, 20 nt, African swine fever virus
  source 1..20: mol_type = genomic RNA
ccgacatgcggacccgattg

SEQ ID NO: 32066 - RNA, 20 nt, African swine fever virus
  source 1..20: mol_type = genomic RNA
ggcttcgttcgcgtacagcg

SEQ ID NO: 32067 - RNA, 20 nt, African swine fever virus
  source 1..20: mol_type = genomic RNA
tccaggttggacgaggcgtt

SEQ ID NO: 32068 - RNA, 20 nt, African swine fever virus
  source 1..20: mol_type = genomic RNA
atgagaatacgcagctggtg

SEQ ID NO: 32069 - RNA, 20 nt, African swine fever virus
  source 1..20: mol_type = genomic RNA
tggacccgatgagaatacgc

SEQ ID NO: 32070 - RNA, 20 nt, African swine fever virus
  source 1..20: mol_type = genomic RNA
caatcaccttggacccgatg

SEQ ID NO: 32071 - RNA, 20 nt, African swine fever virus
  source 1..20: mol_type = genomic RNA
ccacaatcaccttggacccg

SEQ ID NO: 32072 - RNA, 20 nt, African swine fever virus
  source 1..20: mol_type = genomic RNA
tcgggtgttgtcgatacgta

SEQ ID NO: 32073 - RNA, 20 nt, African swine fever virus
  source 1..20: mol_type = genomic RNA
ccatcgggtgttgtcgatac

SEQ ID NO: 32074 - RNA, 20 nt, African swine fever virus
  source 1..20: mol_type = genomic RNA
tccatcgggtgttgtcgata

SEQ ID NO: 32075 - RNA, 20 nt, African swine fever virus
  source 1..20: mol_type = genomic RNA
tcaatggcgtgctttcgcag

SEQ ID NO: 32076 - RNA, 20 nt, African swine fever virus
  source 1..20: mol_type = genomic RNA
atcaatggcgtgctttcgca

SEQ ID NO: 32077 - RNA, 20 nt, African swine fever virus
  source 1..20: mol_type = genomic RNA
gcataggcttatcaatctta

SEQ ID NO: 32078 - RNA, 20 nt, African swine fever virus
  source 1..20: mol_type = genomic RNA
gcgtgatggatggactaagg

SEQ ID NO: 32079 - RNA, 20 nt, African swine fever virus
  source 1..20: mol_type = genomic RNA
acgtttgccggcgtgatgga

SEQ ID NO: 32080 - RNA, 20 nt, African swine fever virus
  source 1..20: mol_type = genomic RNA
tagctcggagtacgtccaca

SEQ ID NO: 32081 - RNA, 20 nt, African swine fever virus
  source 1..20: mol_type = genomic RNA
tccatagctcggagtacgtc

SEQ ID NO: 32082 - RNA, 20 nt, African swine fever virus
  source 1..20: mol_type = genomic RNA
tgtatgagcttgggcgtgga

SEQ ID NO: 32083 - RNA, 20 nt, African swine fever virus
  source 1..20: mol_type = genomic RNA
gcgcgaagttgtcctctgag

SEQ ID NO: 32084 - RNA, 20 nt, African swine fever virus
  source 1..20: mol_type = genomic RNA
gctccattggctcatcctga

SEQ ID NO: 32085 - RNA, 20 nt, African swine fever virus
  source 1..20: mol_type = genomic RNA
gcaagattatctataataag

SEQ ID NO: 32086 - RNA, 20 nt, African swine fever virus
  source 1..20: mol_type = genomic RNA
tacctgcaagattatctata

SEQ ID NO: 32087 - RNA, 20 nt, African swine fever virus
  source 1..20: mol_type = genomic RNA
atacctgcaagattatctat

SEQ ID NO: 32088 - RNA, 20 nt, African swine fever virus
  source 1..20: mol_type = genomic RNA
catacctgcaagattatcta

SEQ ID NO: 32089 - RNA, 20 nt, African swine fever virus
  source 1..20: mol_type = genomic RNA
ccatacctgcaagattatct

SEQ ID NO: 32090 - RNA, 20 nt, African swine fever virus
  source 1..20: mol_type = genomic RNA
tggcatagcccaccagagtg

SEQ ID NO: 32091 - RNA, 20 nt, African swine fever virus
  source 1..20: mol_type = genomic RNA
ccgtggcatagcccaccaga

SEQ ID NO: 32092 - RNA, 20 nt, African swine fever virus
  source 1..20: mol_type = genomic RNA
tatagcctatgacaatgtcg

SEQ ID NO: 32093 - RNA, 20 nt, African swine fever virus
  source 1..20: mol_type = genomic RNA
gtttagcatgcgaatatcag

SEQ ID NO: 32094 - RNA, 20 nt, African swine fever virus
  source 1..20: mol_type = genomic RNA
cggtttagcatgcgaatatc

SEQ ID NO: 32095 - RNA, 20 nt, African swine fever virus
  source 1..20: mol_type = genomic RNA
cgtgtttcgcatacggctcc

SEQ ID NO: 32096 - RNA, 20 nt, African swine fever virus
  source 1..20: mol_type = genomic RNA
tccgcgtgtttcgcatacgg

SEQ ID NO: 32097 - RNA, 20 nt, African swine fever virus
  source 1..20: mol_type = genomic RNA
gtccgcgtgtttcgcatacg

SEQ ID NO: 32098 - RNA, 20 nt, African swine fever virus
  source 1..20: mol_type = genomic RNA
cccgtccgcgtgtttcgcat

SEQ ID NO: 32099 - RNA, 20 nt, African swine fever virus
  source 1..20: mol_type = genomic RNA
gcggattccatcctgcattc

SEQ ID NO: 32100 - RNA, 20 nt, African swine fever virus
  source 1..20: mol_type = genomic RNA
ctattattcgtacgcataat

SEQ ID NO: 32101 - RNA, 20 nt, African swine fever virus
  source 1..20: mol_type = genomic RNA
cttccgctattattcgtacg

SEQ ID NO: 32102 - RNA, 20 nt, African swine fever virus
  source 1..20: mol_type = genomic RNA
ggtatatagtacacgctgct

SEQ ID NO: 32103 - RNA, 20 nt, African swine fever virus
  source 1..20: mol_type = genomic RNA
gttgtctgccaggtatatag

SEQ ID NO: 32104 - RNA, 20 nt, African swine fever virus
  source 1..20: mol_type = genomic RNA
cgtggcactggcctgttgtc

SEQ ID NO: 32105 - RNA, 20 nt, African swine fever virus
  source 1..20: mol_type = genomic RNA
cttgcacgtgatagactgaa

SEQ ID NO: 32106 - RNA, 20 nt, African swine fever virus
  source 1..20: mol_type = genomic RNA
gtgtaagctcctcttgcacg

SEQ ID NO: 32107 - RNA, 20 nt, African swine fever virus
  source 1..20: mol_type = genomic RNA
agcttatagagtaggtatag

SEQ ID NO: 32108 - RNA, 20 nt, African swine fever virus
  source 1..20: mol_type = genomic RNA
atggcgaggacttaaggaga

SEQ ID NO: 32109 - RNA, 20 nt, African swine fever virus
  source 1..20: mol_type = genomic RNA
tttgatattcaatcgtctta

SEQ ID NO: 32110 - RNA, 20 nt, African swine fever virus
  source 1..20: mol_type = genomic RNA
ccgtgaggataacatgttct

SEQ ID NO: 32111 - RNA, 20 nt, African swine fever virus
  source 1..20: mol_type = genomic RNA
tggttatcctccgtgaggat

SEQ ID NO: 32112 - RNA, 20 nt, African swine fever virus
  source 1..20: mol_type = genomic RNA
atgatcgggcctgcatttaa

SEQ ID NO: 32113 - RNA, 20 nt, African swine fever virus
  source 1..20: mol_type = genomic RNA
ggagcctatgatcgggcctg

SEQ ID NO: 32114 - RNA, 20 nt, African swine fever virus
  source 1..20: mol_type = genomic RNA
ggattacccgcgaatattac

SEQ ID NO: 32115 - RNA, 20 nt, African swine fever virus
  source 1..20: mol_type = genomic RNA
tacgggagtttgaagaagaa

SEQ ID NO: 32116 - RNA, 20 nt, African swine fever virus
  source 1..20: mol_type = genomic RNA
gtgccatacgggagtttgaa

SEQ ID NO: 32117 - RNA, 20 nt, African swine fever virus
  source 1..20: mol_type = genomic RNA
aaggaagatgagtcggacct

SEQ ID NO: 32118 - RNA, 20 nt, African swine fever virus
  source 1..20: mol_type = genomic RNA
aagggtaagccgaaggaaga

SEQ ID NO: 32119 - RNA, 20 nt, African swine fever virus
  source 1..20: mol_type = genomic RNA
ttcagcaatggcgacttcta

SEQ ID NO: 32120 - RNA, 20 nt, African swine fever virus
  source 1..20: mol_type = genomic RNA
gttacccttcagcaatggcg

SEQ ID NO: 32121 - RNA, 20 nt, African swine fever virus
  source 1..20: mol_type = genomic RNA
tgttgggagaacaggtctta

SEQ ID NO: 32122 - RNA, 20 nt, African swine fever virus
  source 1..20: mol_type = genomic RNA
ccatgttgggagaacaggtc

SEQ ID NO: 32123 - RNA, 20 nt, African swine fever virus
  source 1..20: mol_type = genomic RNA
ggccgttctgtgccataagc

SEQ ID NO: 32124 - RNA, 20 nt, African swine fever virus
  source 1..20: mol_type = genomic RNA
gtttattcactatcttatga

SEQ ID NO: 32125 - RNA, 20 nt, African swine fever virus
  source 1..20: mol_type = genomic RNA
aatttacgggtttcccaagg

SEQ ID NO: 32126 - RNA, 20 nt, African swine fever virus
  source 1..20: mol_type = genomic RNA
acatttacgtgttgcatcaa

SEQ ID NO: 32127 - RNA, 20 nt, African swine fever virus
  source 1..20: mol_type = genomic RNA
acagcacaagcacgctacca

SEQ ID NO: 32128 - RNA, 20 nt, African swine fever virus
  source 1..20: mol_type = genomic RNA
gacagcacaagcacgctacc

SEQ ID NO: 32129 - RNA, 20 nt, African swine fever virus
  source 1..20: mol_type = genomic RNA
cgctcgcggagcttgtttat

SEQ ID NO: 32130 - RNA, 20 nt, African swine fever virus
  source 1..20: mol_type = genomic RNA
aaccgcgctcgcggagcttg

SEQ ID NO: 32131 - RNA, 20 nt, African swine fever virus
  source 1..20: mol_type = genomic RNA
gggttatcgatcttggaata

SEQ ID NO: 32132 - RNA, 20 nt, African swine fever virus
  source 1..20: mol_type = genomic RNA
ttctggaatgtacttcgccg

SEQ ID NO: 32133 - RNA, 20 nt, African swine fever virus
  source 1..20: mol_type = genomic RNA
aactcacatggcttaactat

SEQ ID NO: 32134 - RNA, 20 nt, African swine fever virus
  source 1..20: mol_type = genomic RNA
gtacagtttcagccatcgga

SEQ ID NO: 32135 - RNA, 20 nt, African swine fever virus
  source 1..20: mol_type = genomic RNA
tgcatctactatttgtaggc

SEQ ID NO: 32136 - RNA, 20 nt, African swine fever virus
  source 1..20: mol_type = genomic RNA
gggataacacattagacttt

SEQ ID NO: 32137 - RNA, 20 nt, African swine fever virus
  source 1..20: mol_type = genomic RNA
atattctattgatggcatca

SEQ ID NO: 32138 - RNA, 20 nt, African swine fever virus
  source 1..20: mol_type = genomic RNA
tttatttcgctaacaagtgc

SEQ ID NO: 32139 - RNA, 20 nt, African swine fever virus
  source 1..20: mol_type = genomic RNA
gctatacagcctaggtacca

SEQ ID NO: 32140 - RNA, 20 nt, African swine fever virus
  source 1..20: mol_type = genomic RNA
ttggctactatgtaacggac

SEQ ID NO: 32141 - RNA, 20 nt, African swine fever virus
  source 1..20: mol_type = genomic RNA
gttggctactatgtaacgga

SEQ ID NO: 32142 - RNA, 20 nt, African swine fever virus
  source 1..20: mol_type = genomic RNA
cccgttggctactatgtaac

SEQ ID NO: 32143 - RNA, 20 nt, African swine fever virus
  source 1..20: mol_type = genomic RNA
ccaggccattgaattcattg

SEQ ID NO: 32144 - RNA, 20 nt, African swine fever virus
  source 1..20: mol_type = genomic RNA
aaccatttaatgctaacagc

SEQ ID NO: 32145 - RNA, 20 nt, African swine fever virus
  source 1..20: mol_type = genomic RNA
aacggcggcagatgttataa

SEQ ID NO: 32146 - RNA, 20 nt, African swine fever virus
  source 1..20: mol_type = genomic RNA
taacggcggcagatgttata

SEQ ID NO: 32147 - RNA, 20 nt, African swine fever virus
  source 1..20: mol_type = genomic RNA
aatccctaacggcggcagat

SEQ ID NO: 32148 - RNA, 20 nt, African swine fever virus
  source 1..20: mol_type = genomic RNA
gaatccctaacggcggcaga

SEQ ID NO: 32149 - RNA, 20 nt, African swine fever virus
  source 1..20: mol_type = genomic RNA
ggtggactaccgttgtggca

SEQ ID NO: 32150 - RNA, 20 nt, African swine fever virus
  source 1..20: mol_type = genomic RNA
tgaatgcctggtggactacc

SEQ ID NO: 32151 - RNA, 20 nt, African swine fever virus
  source 1..20: mol_type = genomic RNA
ttgcgcttgcgctgcacgat

SEQ ID NO: 32152 - RNA, 20 nt, African swine fever virus
  source 1..20: mol_type = genomic RNA
cagctcgaacgccattgcgc

SEQ ID NO: 32153 - RNA, 20 nt, African swine fever virus
  source 1..20: mol_type = genomic RNA
tgcgcgaatacaagagaatg

SEQ ID NO: 32154 - RNA, 20 nt, African swine fever virus
  source 1..20: mol_type = genomic RNA
tttccgtgcgcgaatacaag

SEQ ID NO: 32155 - RNA, 20 nt, African swine fever virus
  source 1..20: mol_type = genomic RNA
aatatactctcacgtctata

SEQ ID NO: 32156 - RNA, 20 nt, African swine fever virus
  source 1..20: mol_type = genomic RNA
ttgcagaggtttgcggtgta

SEQ ID NO: 32157 - RNA, 20 nt, African swine fever virus
  source 1..20: mol_type = genomic RNA
cgatccattgcagaggtttg

SEQ ID NO: 32158 - RNA, 20 nt, African swine fever virus
  source 1..20: mol_type = genomic RNA
gcgatccattgcagaggttt

SEQ ID NO: 32159 - RNA, 20 nt, African swine fever virus
  source 1..20: mol_type = genomic RNA
cgcgatccattgcagaggtt

SEQ ID NO: 32160 - RNA, 20 nt, African swine fever virus
  source 1..20: mol_type = genomic RNA
catccacattcttcacgcta

SEQ ID NO: 32161 - RNA, 20 nt, African swine fever virus
  source 1..20: mol_type = genomic RNA
taagcctaagggcctcatcc

SEQ ID NO: 32162 - RNA, 20 nt, African swine fever virus
  source 1..20: mol_type = genomic RNA
ttggcattgcgtacgatggc

SEQ ID NO: 32163 - RNA, 20 nt, African swine fever virus
  source 1..20: mol_type = genomic RNA
attggcattgcgtacgatgg

SEQ ID NO: 32164 - RNA, 20 nt, African swine fever virus
  source 1..20: mol_type = genomic RNA
gctcatagggcccattggca

SEQ ID NO: 32165 - RNA, 20 nt, African swine fever virus
  source 1..20: mol_type = genomic RNA
ggctcatagggcccattggc

SEQ ID NO: 32166 - RNA, 20 nt, African swine fever virus
  source 1..20: mol_type = genomic RNA
accgcacgggcctgaagagg

SEQ ID NO: 32167 - RNA, 20 nt, African swine fever virus
  source 1..20: mol_type = genomic RNA
gcaatattgaactgaacggc

SEQ ID NO: 32168 - RNA, 20 nt, African swine fever virus
  source 1..20: mol_type = genomic RNA
tgcctcttatggtcattgtc

SEQ ID NO: 32169 - RNA, 20 nt, African swine fever virus
  source 1..20: mol_type = genomic RNA
cctcggcgggaagggtgccc

SEQ ID NO: 32170 - RNA, 20 nt, African swine fever virus
  source 1..20: mol_type = genomic RNA
ttcgcgcatcatagataccc

SEQ ID NO: 32171 - RNA, 20 nt, African swine fever virus
  source 1..20: mol_type = genomic RNA
attcgcgcatcatagatacc

SEQ ID NO: 32172 - RNA, 20 nt, African swine fever virus
  source 1..20: mol_type = genomic RNA
tacattgcttgcgctggtgt

SEQ ID NO: 32173 - RNA, 20 nt, African swine fever virus
  source 1..20: mol_type = genomic RNA
atacattgcttgcgctggtg

SEQ ID NO: 32174 - RNA, 20 nt, African swine fever virus
  source 1..20: mol_type = genomic RNA
agggtgtcccatacattgct

SEQ ID NO: 32175 - RNA, 20 nt, African swine fever virus
  source 1..20: mol_type = genomic RNA
tcgtcgtatttcggcgatga

SEQ ID NO: 32176 - RNA, 20 nt, African swine fever virus
  source 1..20: mol_type = genomic RNA
taaccatcgtcgtatttcgg

SEQ ID NO: 32177 - RNA, 20 nt, African swine fever virus
  source 1..20: mol_type = genomic RNA
ttaaccatcgtcgtatttcg

SEQ ID NO: 32178 - RNA, 20 nt, African swine fever virus
  source 1..20: mol_type = genomic RNA
cagttgaggcatataaccct

SEQ ID NO: 32179 - RNA, 20 nt, African swine fever virus
  source 1..20: mol_type = genomic RNA
gcagttgaggcatataaccc

SEQ ID NO: 32180 - RNA, 20 nt, African swine fever virus
  source 1..20: mol_type = genomic RNA
cttcaataagacgcttaggc

SEQ ID NO: 32181 - RNA, 20 nt, African swine fever virus
  source 1..20: mol_type = genomic RNA
tcggtttggcttgaagccgc

SEQ ID NO: 32182 - RNA, 20 nt, African swine fever virus
  source 1..20: mol_type = genomic RNA
tacagacgtagcactgcttt

SEQ ID NO: 32183 - RNA, 20 nt, African swine fever virus
  source 1..20: mol_type = genomic RNA
atctgatgccaggtcgtatg

SEQ ID NO: 32184 - RNA, 20 nt, African swine fever virus
  source 1..20: mol_type = genomic RNA
aatctgatgccaggtcgtat

SEQ ID NO: 32185 - RNA, 20 nt, African swine fever virus
  source 1..20: mol_type = genomic RNA
gacccgattcccaatctgat

SEQ ID NO: 32186 - RNA, 20 nt, African swine fever virus
  source 1..20: mol_type = genomic RNA
gatactggatcacgttatta

SEQ ID NO: 32187 - RNA, 20 nt, African swine fever virus
  source 1..20: mol_type = genomic RNA
tcgggatcagcagattcttt

SEQ ID NO: 32188 - RNA, 20 nt, African swine fever virus
  source 1..20: mol_type = genomic RNA
cgcacgatttgtaggtcctt

SEQ ID NO: 32189 - RNA, 20 nt, African swine fever virus
  source 1..20: mol_type = genomic RNA
gtgcctccctgggttgcggt

SEQ ID NO: 32190 - RNA, 20 nt, African swine fever virus
  source 1..20: mol_type = genomic RNA
atgacgatcccacgctttcc

SEQ ID NO: 32191 - RNA, 20 nt, African swine fever virus
  source 1..20: mol_type = genomic RNA
ccatgacgatcccacgcttt

SEQ ID NO: 32192 - RNA, 20 nt, African swine fever virus
  source 1..20: mol_type = genomic RNA
ccttgcgaggaagtcttcgc

SEQ ID NO: 32193 - RNA, 20 nt, African swine fever virus
  source 1..20: mol_type = genomic RNA
tccttgcgaggaagtcttcg

SEQ ID NO: 32194 - RNA, 20 nt, African swine fever virus
  source 1..20: mol_type = genomic RNA
agtagggatttacgaattct

SEQ ID NO: 32195 - RNA, 20 nt, African swine fever virus
  source 1..20: mol_type = genomic RNA
gctgatcgaccatacctggc

SEQ ID NO: 32196 - RNA, 20 nt, African swine fever virus
  source 1..20: mol_type = genomic RNA
caacttgcagcgttcgtgca

SEQ ID NO: 32197 - RNA, 20 nt, African swine fever virus
  source 1..20: mol_type = genomic RNA
caatatcgtgaacggattgt

SEQ ID NO: 32198 - RNA, 20 nt, African swine fever virus
  source 1..20: mol_type = genomic RNA
tcaatatcgtgaacggattg

SEQ ID NO: 32199 - RNA, 20 nt, African swine fever virus
  source 1..20: mol_type = genomic RNA
atgctgcttcgttcgagaga

SEQ ID NO: 32200 - RNA, 20 nt, African swine fever virus
  source 1..20: mol_type = genomic RNA
tatgctgcttcgttcgagag

SEQ ID NO: 32201 - RNA, 20 nt, African swine fever virus
  source 1..20: mol_type = genomic RNA
ctatgctgcttcgttcgaga

SEQ ID NO: 32202 - RNA, 20 nt, African swine fever virus
  source 1..20: mol_type = genomic RNA
cattataccaggcacatgcg

SEQ ID NO: 32203 - RNA, 20 nt, African swine fever virus
  source 1..20: mol_type = genomic RNA
caacgcggctcatgacgctc

SEQ ID NO: 32204 - RNA, 20 nt, African swine fever virus
  source 1..20: mol_type = genomic RNA
ttaacgggacccgaactctt

SEQ ID NO: 32205 - RNA, 20 nt, African swine fever virus
  source 1..20: mol_type = genomic RNA
gcccattaacgggacccgaa

SEQ ID NO: 32206 - RNA, 20 nt, African swine fever virus
  source 1..20: mol_type = genomic RNA
atggcgtgcagtttgttcat

SEQ ID NO: 32207 - RNA, 20 nt, African swine fever virus
  source 1..20: mol_type = genomic RNA
gcttgttataatgcatgtag

SEQ ID NO: 32208 - RNA, 20 nt, African swine fever virus
  source 1..20: mol_type = genomic RNA
tcaatgagttcgccgttgcg

SEQ ID NO: 32209 - RNA, 20 nt, African swine fever virus
  source 1..20: mol_type = genomic RNA
gctgcggcccatatctacgc

SEQ ID NO: 32210 - RNA, 20 nt, African swine fever virus
  source 1..20: mol_type = genomic RNA
gcgttgcgcacgtagttcag

SEQ ID NO: 32211 - RNA, 20 nt, African swine fever virus
  source 1..20: mol_type = genomic RNA
tggacactgtgaatccggcg

SEQ ID NO: 32212 - RNA, 20 nt, African swine fever virus
  source 1..20: mol_type = genomic RNA
gggttaggagcatgtcggcc

SEQ ID NO: 32213 - RNA, 20 nt, African swine fever virus
  source 1..20: mol_type = genomic RNA
ccgactcaagcagcagttta

SEQ ID NO: 32214 - RNA, 20 nt, African swine fever virus
  source 1..20: mol_type = genomic RNA
tgaagcagccggttgtttat

SEQ ID NO: 32215 - RNA, 20 nt, African swine fever virus
  source 1..20: mol_type = genomic RNA
ttggtttccggattaatgga

SEQ ID NO: 32216 - RNA, 20 nt, African swine fever virus
  source 1..20: mol_type = genomic RNA
ccatgatgtgaatcatattg

SEQ ID NO: 32217 - RNA, 20 nt, African swine fever virus
  source 1..20: mol_type = genomic RNA
atgcccgccatgatgtgaat

SEQ ID NO: 32218 - RNA, 20 nt, African swine fever virus
  source 1..20: mol_type = genomic RNA
gcaatatagctgttgcagat

SEQ ID NO: 32219 - RNA, 20 nt, African swine fever virus
  source 1..20: mol_type = genomic RNA
aagatggctttacggttggc

SEQ ID NO: 32220 - RNA, 20 nt, African swine fever virus
  source 1..20: mol_type = genomic RNA
gtcggtaataatccacaata

SEQ ID NO: 32221 - RNA, 20 nt, African swine fever virus
  source 1..20: mol_type = genomic RNA
tacaactgctgcacaagacg

SEQ ID NO: 32222 - RNA, 20 nt, African swine fever virus
  source 1..20: mol_type = genomic RNA
ctccgtacaactgctgcaca

SEQ ID NO: 32223 - RNA, 20 nt, African swine fever virus
  source 1..20: mol_type = genomic RNA
tacggtttcgagctggcgtg

SEQ ID NO: 32224 - RNA, 20 nt, African swine fever virus
  source 1..20: mol_type = genomic RNA
ggtccgacagcatgatggtt

SEQ ID NO: 32225 - RNA, 20 nt, African swine fever virus
  source 1..20: mol_type = genomic RNA
gtgtacttgaatttgtcctc

SEQ ID NO: 32226 - RNA, 20 nt, African swine fever virus
  source 1..20: mol_type = genomic RNA
ggtgtacttgaatttgtcct

SEQ ID NO: 32227 - RNA, 20 nt, African swine fever virus
  source 1..20: mol_type = genomic RNA
cgtttaccggcacctgtcta

SEQ ID NO: 32228 - RNA, 20 nt, African swine fever virus
  source 1..20: mol_type = genomic RNA
gttcgatgcgaataagcatg

SEQ ID NO: 32229 - RNA, 20 nt, African swine fever virus
  source 1..20: mol_type = genomic RNA
ggatggcactcatctgctcg

SEQ ID NO: 32230 - RNA, 20 nt, African swine fever virus
  source 1..20: mol_type = genomic RNA
tatgaggtccaggatggcac

SEQ ID NO: 32231 - RNA, 20 nt, African swine fever virus
  source 1..20: mol_type = genomic RNA
caccgtagttaataagactt

SEQ ID NO: 32232 - RNA, 20 nt, African swine fever virus
  source 1..20: mol_type = genomic RNA
cctcaccgtagttaataaga

SEQ ID NO: 32233 - RNA, 20 nt, African swine fever virus
  source 1..20: mol_type = genomic RNA
ccgcctcaccgtagttaata

SEQ ID NO: 32234 - RNA, 20 nt, African swine fever virus
  source 1..20: mol_type = genomic RNA
accgcctcaccgtagttaat

SEQ ID NO: 32235 - RNA, 20 nt, African swine fever virus
  source 1..20: mol_type = genomic RNA
ggattcccaccgcctcaccg

SEQ ID NO: 32236 - RNA, 20 nt, African swine fever virus
  source 1..20: mol_type = genomic RNA
ccaggattcccaccgcctca

SEQ ID NO: 32237 - RNA, 20 nt, African swine fever virus
  source 1..20: mol_type = genomic RNA
gcatatattgcgtcaagggt

SEQ ID NO: 32238 - RNA, 20 nt, African swine fever virus
  source 1..20: mol_type = genomic RNA
gtggtgggagtccagcatat

SEQ ID NO: 32239 - RNA, 20 nt, African swine fever virus
  source 1..20: mol_type = genomic RNA
cggaccggtggtgggagtcc

SEQ ID NO: 32240 - RNA, 20 nt, African swine fever virus
  source 1..20: mol_type = genomic RNA
ggccacggaccggtggtggg

SEQ ID NO: 32241 - RNA, 20 nt, African swine fever virus
  source 1..20: mol_type = genomic RNA
ccggccacggaccggtggtg

SEQ ID NO: 32242 - RNA, 20 nt, African swine fever virus
  source 1..20: mol_type = genomic RNA
cacaattcccgacttgttgg

SEQ ID NO: 32243 - RNA, 20 nt, African swine fever virus
  source 1..20: mol_type = genomic RNA
cttccgggttctttagacgt

SEQ ID NO: 32244 - RNA, 20 nt, African swine fever virus
  source 1..20: mol_type = genomic RNA
ttcgaacgttataagctcta

SEQ ID NO: 32245 - RNA, 20 nt, African swine fever virus
  source 1..20: mol_type = genomic RNA
agcggatacaccagtttgca

SEQ ID NO: 32246 - RNA, 20 nt, African swine fever virus
  source 1..20: mol_type = genomic RNA
cagaatgcatgatgtaggtg

SEQ ID NO: 32247 - RNA, 20 nt, African swine fever virus
  source 1..20: mol_type = genomic RNA
tagatatatgcgaataatga

SEQ ID NO: 32248 - RNA, 20 nt, African swine fever virus
  source 1..20: mol_type = genomic RNA
gtagatatatgcgaataatg

SEQ ID NO: 32249 - RNA, 20 nt, African swine fever virus
  source 1..20: mol_type = genomic RNA
ttcgggtattagtactgcgt

SEQ ID NO: 32250 - RNA, 20 nt, African swine fever virus
  source 1..20: mol_type = genomic RNA
ctaatcgtgctatttaatag

SEQ ID NO: 32251 - RNA, 20 nt, African swine fever virus
  source 1..20: mol_type = genomic RNA
ggtattcctctaatcgtgct

SEQ ID NO: 32252 - RNA, 20 nt, African swine fever virus
  source 1..20: mol_type = genomic RNA
cacggtggcgcataagctta

SEQ ID NO: 32253 - RNA, 20 nt, African swine fever virus
  source 1..20: mol_type = genomic RNA
tgggcatccacacggtggcg

SEQ ID NO: 32254 - RNA, 20 nt, African swine fever virus
  source 1..20: mol_type = genomic RNA
atagaggacgacacgatggt

SEQ ID NO: 32255 - RNA, 20 nt, African swine fever virus
  source 1..20: mol_type = genomic RNA
ataaccgttctaatttcact

SEQ ID NO: 32256 - RNA, 20 nt, African swine fever virus
  source 1..20: mol_type = genomic RNA
cataaccgttctaatttcac

SEQ ID NO: 32257 - RNA, 20 nt, African swine fever virus
  source 1..20: mol_type = genomic RNA
ccataaccgttctaatttca

SEQ ID NO: 32258 - RNA, 20 nt, African swine fever virus
  source 1..20: mol_type = genomic RNA
gttcttgtcatgagatctgc

SEQ ID NO: 32259 - RNA, 20 nt, African swine fever virus
  source 1..20: mol_type = genomic RNA
gtcccgttcttgtcatgaga

SEQ ID NO: 32260 - RNA, 20 nt, African swine fever virus
  source 1..20: mol_type = genomic RNA
ttcgcaacaacacgttggaa

SEQ ID NO: 32261 - RNA, 20 nt, African swine fever virus
  source 1..20: mol_type = genomic RNA
taagggtaggcgcggcaata

SEQ ID NO: 32262 - RNA, 20 nt, African swine fever virus
  source 1..20: mol_type = genomic RNA
ataagggtaggcgcggcaat

SEQ ID NO: 32263 - RNA, 20 nt, African swine fever virus
  source 1..20: mol_type = genomic RNA
atgcgaggaacagagcccat

SEQ ID NO: 32264 - RNA, 20 nt, African swine fever virus
  source 1..20: mol_type = genomic RNA
tatgcgaggaacagagccca

SEQ ID NO: 32265 - RNA, 20 nt, African swine fever virus
  source 1..20: mol_type = genomic RNA
taatgatgtcagagtacatg

SEQ ID NO: 32266 - RNA, 20 nt, African swine fever virus
  source 1..20: mol_type = genomic RNA
ttatgcgaatgttgggcagg

SEQ ID NO: 32267 - RNA, 20 nt, African swine fever virus
  source 1..20: mol_type = genomic RNA
tttatgcgaatgttgggcag

SEQ ID NO: 32268 - RNA, 20 nt, African swine fever virus
  source 1..20: mol_type = genomic RNA
atccggataatattcataag

SEQ ID NO: 32269 - RNA, 20 nt, African swine fever virus
  source 1..20: mol_type = genomic RNA
ctacaagtatactaacaccg

SEQ ID NO: 32270 - RNA, 20 nt, African swine fever virus
  source 1..20: mol_type = genomic RNA
gctacaagtatactaacacc

SEQ ID NO: 32271 - RNA, 20 nt, African swine fever virus
  source 1..20: mol_type = genomic RNA
atcgcacgcattcgtattaa

SEQ ID NO: 32272 - RNA, 20 nt, African swine fever virus
  source 1..20: mol_type = genomic RNA
aatcctatcgcacgcattcg

SEQ ID NO: 32273 - RNA, 20 nt, African swine fever virus
  source 1..20: mol_type = genomic RNA
ttgccgaatcctatcgcacg

SEQ ID NO: 32274 - RNA, 20 nt, African swine fever virus
  source 1..20: mol_type = genomic RNA
ttggaagatgatggtctcac

SEQ ID NO: 32275 - RNA, 20 nt, African swine fever virus
  source 1..20: mol_type = genomic RNA
ccgttggaagatgatggtct

SEQ ID NO: 32276 - RNA, 20 nt, African swine fever virus
  source 1..20: mol_type = genomic RNA
gtaccgatgaagaggttata

SEQ ID NO: 32277 - RNA, 20 nt, African swine fever virus
  source 1..20: mol_type = genomic RNA
agtaccgatgaagaggttat

SEQ ID NO: 32278 - RNA, 20 nt, African swine fever virus
  source 1..20: mol_type = genomic RNA
ttcctcccagtaccgatgaa

SEQ ID NO: 32279 - RNA, 20 nt, African swine fever virus
  source 1..20: mol_type = genomic RNA
acaagcattgcaacaagcaa

SEQ ID NO: 32280 - RNA, 20 nt, African swine fever virus
  source 1..20: mol_type = genomic RNA
atgcgggtgtgttgtcgcac

SEQ ID NO: 32281 - RNA, 20 nt, African swine fever virus
  source 1..20: mol_type = genomic RNA
aatgcgggtgtgttgtcgca

SEQ ID NO: 32282 - RNA, 20 nt, African swine fever virus
  source 1..20: mol_type = genomic RNA
attggaacctacgcggcaat

SEQ ID NO: 32283 - RNA, 20 nt, African swine fever virus
  source 1..20: mol_type = genomic RNA
agttccaacacggctacact

SEQ ID NO: 32284 - RNA, 20 nt, African swine fever virus
  source 1..20: mol_type = genomic RNA
gtagccttacagacctagtt

SEQ ID NO: 32285 - RNA, 20 nt, African swine fever virus
  source 1..20: mol_type = genomic RNA
aaccagtagccttacagacc

SEQ ID NO: 32286 - RNA, 20 nt, African swine fever virus
  source 1..20: mol_type = genomic RNA
ttatcaacagtactgacttt

SEQ ID NO: 32287 - RNA, 20 nt, African swine fever virus
  source 1..20: mol_type = genomic RNA
gagatattgcgcccaatgat

SEQ ID NO: 32288 - RNA, 20 nt, African swine fever virus
  source 1..20: mol_type = genomic RNA
ccggagatattgcgcccaat

SEQ ID NO: 32289 - RNA, 20 nt, African swine fever virus
  source 1..20: mol_type = genomic RNA
gctatgtacggcgataagca

SEQ ID NO: 32290 - RNA, 20 nt, African swine fever virus
  source 1..20: mol_type = genomic RNA
cacgttgatggatcaaccca

SEQ ID NO: 32291 - RNA, 20 nt, African swine fever virus
  source 1..20: mol_type = genomic RNA
tcaacgcactgcgtttctgg

SEQ ID NO: 32292 - RNA, 20 nt, African swine fever virus
  source 1..20: mol_type = genomic RNA
tacgacattacggccctatt

SEQ ID NO: 32293 - RNA, 20 nt, African swine fever virus
  source 1..20: mol_type = genomic RNA
ataccatacgacattacggc

SEQ ID NO: 32294 - RNA, 20 nt, African swine fever virus
  source 1..20: mol_type = genomic RNA
agtcgtgcaggcctataatg

SEQ ID NO: 32295 - RNA, 20 nt, African swine fever virus
  source 1..20: mol_type = genomic RNA
aacctagtcgtgcaggccta

SEQ ID NO: 32296 - RNA, 20 nt, African swine fever virus
  source 1..20: mol_type = genomic RNA
tcaataaggttacaacacct

SEQ ID NO: 32297 - RNA, 20 nt, African swine fever virus
  source 1..20: mol_type = genomic RNA
ataccaatcacgtgcgtact

SEQ ID NO: 32298 - RNA, 20 nt, African swine fever virus
  source 1..20: mol_type = genomic RNA
atatgttattcggatcccga

SEQ ID NO: 32299 - RNA, 20 nt, African swine fever virus
  source 1..20: mol_type = genomic RNA
attcggctactaaggaggtg

SEQ ID NO: 32300 - RNA, 20 nt, African swine fever virus
  source 1..20: mol_type = genomic RNA
ttatggacatagccgattcg

SEQ ID NO: 32301 - RNA, 20 nt, African swine fever virus
  source 1..20: mol_type = genomic RNA
aacctttatggacatagccg

SEQ ID NO: 32302 - RNA, 20 nt, African swine fever virus
  source 1..20: mol_type = genomic RNA
accggatggaatggtacaga

SEQ ID NO: 32303 - RNA, 20 nt, African swine fever virus
  source 1..20: mol_type = genomic RNA
agtttattaaggtactgccg

SEQ ID NO: 32304 - RNA, 20 nt, African swine fever virus
  source 1..20: mol_type = genomic RNA
accgagtttattaaggtact

SEQ ID NO: 32305 - RNA, 20 nt, African swine fever virus
  source 1..20: mol_type = genomic RNA
ttgatgactgtatgcgtcaa

SEQ ID NO: 32306 - RNA, 20 nt, African swine fever virus
  source 1..20: mol_type = genomic RNA
cgcacgcgtattgccattga

SEQ ID NO: 32307 - RNA, 20 nt, African swine fever virus
  source 1..20: mol_type = genomic RNA
tatactccgcgcacgcgtat

SEQ ID NO: 32308 - RNA, 20 nt, African swine fever virus
  source 1..20: mol_type = genomic RNA
aagcatatctcgccgtatac

SEQ ID NO: 32309 - RNA, 20 nt, African swine fever virus
  source 1..20: mol_type = genomic RNA
gttcctaagcatatctcgcc

SEQ ID NO: 32310 - RNA, 20 nt, African swine fever virus
  source 1..20: mol_type = genomic RNA
ccggttcctaagcatatctc

SEQ ID NO: 32311 - RNA, 20 nt, African swine fever virus
  source 1..20: mol_type = genomic RNA
gccggttcctaagcatatct

SEQ ID NO: 32312 - RNA, 20 nt, African swine fever virus
  source 1..20: mol_type = genomic RNA
actagcggtctggatcatgg

SEQ ID NO: 32313 - RNA, 20 nt, African swine fever virus
  source 1..20: mol_type = genomic RNA
gatcgccgactagcggtctg

SEQ ID NO: 32314 - RNA, 20 nt, African swine fever virus
  source 1..20: mol_type = genomic RNA
ttcctgatcgccgactagcg

SEQ ID NO: 32315 - RNA, 20 nt, African swine fever virus
  source 1..20: mol_type = genomic RNA
tttcctgatcgccgactagc

SEQ ID NO: 32316 - RNA, 20 nt, African swine fever virus
  source 1..20: mol_type = genomic RNA
gcatatatatgagcagattt

SEQ ID NO: 32317 - RNA, 20 nt, African swine fever virus
  source 1..20: mol_type = genomic RNA
ttgccctgcatatatatgag

SEQ ID NO: 32318 - RNA, 20 nt, African swine fever virus
  source 1..20: mol_type = genomic RNA
gatgttcagtatacccttgc

SEQ ID NO: 32319 - RNA, 20 nt, African swine fever virus
  source 1..20: mol_type = genomic RNA
ttccatattgttcaatatgt

SEQ ID NO: 32320 - RNA, 20 nt, African swine fever virus
  source 1..20: mol_type = genomic RNA
gcagctttgctttactcgat

SEQ ID NO: 32321 - RNA, 20 nt, African swine fever virus
  source 1..20: mol_type = genomic RNA
gctcgaggatcgggcagttg

SEQ ID NO: 32322 - RNA, 20 nt, African swine fever virus
  source 1..20: mol_type = genomic RNA
ggttaatggcgtctgcaatc

SEQ ID NO: 32323 - RNA, 20 nt, African swine fever virus
  source 1..20: mol_type = genomic RNA
tcggtggtatctatgagctt

SEQ ID NO: 32324 - RNA, 20 nt, African swine fever virus
  source 1..20: mol_type = genomic RNA
atcggtggtatctatgagct

SEQ ID NO: 32325 - RNA, 20 nt, African swine fever virus
  source 1..20: mol_type = genomic RNA
catcggtggtatctatgagc

SEQ ID NO: 32326 - RNA, 20 nt, African swine fever virus
  source 1..20: mol_type = genomic RNA
cgcgcagtccatgagttagg

SEQ ID NO: 32327 - RNA, 20 nt, African swine fever virus
  source 1..20: mol_type = genomic RNA
tgtacatcaagatattccgc

SEQ ID NO: 32328 - RNA, 20 nt, African swine fever virus
  source 1..20: mol_type = genomic RNA
tgcgctcgtgaagttgctta

SEQ ID NO: 32329 - RNA, 20 nt, African swine fever virus
  source 1..20: mol_type = genomic RNA
tcaccatgcgctcgtgaagt

SEQ ID NO: 32330 - RNA, 20 nt, African swine fever virus
  source 1..20: mol_type = genomic RNA
ccgtcaccatgcgctcgtga

SEQ ID NO: 32331 - RNA, 20 nt, African swine fever virus
  source 1..20: mol_type = genomic RNA
catccgtctgcagtttatca

SEQ ID NO: 32332 - RNA, 20 nt, African swine fever virus
  source 1..20: mol_type = genomic RNA
gtctttgcgcttcaatcctc

SEQ ID NO: 32333 - RNA, 20 nt, African swine fever virus
  source 1..20: mol_type = genomic RNA
cgttatgttcggcgtcaagg

SEQ ID NO: 32334 - RNA, 20 nt, African swine fever virus
  source 1..20: mol_type = genomic RNA
ataagacttagatcaagcgc

SEQ ID NO: 32335 - RNA, 20 nt, African swine fever virus
  source 1..20: mol_type = genomic RNA
gcgaccgcgcggccttgctg

SEQ ID NO: 32336 - RNA, 20 nt, African swine fever virus
  source 1..20: mol_type = genomic RNA
ggttgaggtcaacctgcgac

SEQ ID NO: 32337 - RNA, 20 nt, African swine fever virus
  source 1..20: mol_type = genomic RNA
actgcatgaggcgtcccgca

SEQ ID NO: 32338 - RNA, 20 nt, African swine fever virus
  source 1..20: mol_type = genomic RNA
tatccaactgcatgaggcgt

SEQ ID NO: 32339 - RNA, 20 nt, African swine fever virus
  source 1..20: mol_type = genomic RNA
gagaattaatgcgcgcattt

SEQ ID NO: 32340 - RNA, 20 nt, African swine fever virus
  source 1..20: mol_type = genomic RNA
cgtgtcctctggcaagatct

SEQ ID NO: 32341 - RNA, 20 nt, African swine fever virus
  source 1..20: mol_type = genomic RNA
acgtgtcctctggcaagatc

SEQ ID NO: 32342 - RNA, 20 nt, African swine fever virus
  source 1..20: mol_type = genomic RNA
gggtttgggcccacgtgtcc

SEQ ID NO: 32343 - RNA, 20 nt, African swine fever virus
  source 1..20: mol_type = genomic RNA
ccagggtttgggcccacgtg

SEQ ID NO: 32344 - RNA, 20 nt, African swine fever virus
  source 1..20: mol_type = genomic RNA
gctcgatggcgcttacagct

SEQ ID NO: 32345 - RNA, 20 nt, African swine fever virus
  source 1..20: mol_type = genomic RNA
gagctcgatagaagcggcgt

SEQ ID NO: 32346 - RNA, 20 nt, African swine fever virus
  source 1..20: mol_type = genomic RNA
tccagagctcgatagaagcg

SEQ ID NO: 32347 - RNA, 20 nt, African swine fever virus
  source 1..20: mol_type = genomic RNA
ttccagagctcgatagaagc

SEQ ID NO: 32348 - RNA, 20 nt, African swine fever virus
  source 1..20: mol_type = genomic RNA
acatctgctggactgtttga

SEQ ID NO: 32349 - RNA, 20 nt, African swine fever virus
  source 1..20: mol_type = genomic RNA
ataatgcgcacgccatccaa

SEQ ID NO: 32350 - RNA, 20 nt, African swine fever virus
  source 1..20: mol_type = genomic RNA
tcgtcctataatgcgcacgc

SEQ ID NO: 32351 - RNA, 20 nt, African swine fever virus
  source 1..20: mol_type = genomic RNA
cggtgaaccatcgtcctata

SEQ ID NO: 32352 - RNA, 20 nt, African swine fever virus
  source 1..20: mol_type = genomic RNA
gttgcctcggtgaaccatcg

SEQ ID NO: 32353 - RNA, 20 nt, African swine fever virus
  source 1..20: mol_type = genomic RNA
tgttgcctcggtgaaccatc

SEQ ID NO: 32354 - RNA, 20 nt, African swine fever virus
  source 1..20: mol_type = genomic RNA
acgcttcggccttgttggat

SEQ ID NO: 32355 - RNA, 20 nt, African swine fever virus
  source 1..20: mol_type = genomic RNA
agcatgtctccaatccgggc

SEQ ID NO: 32356 - RNA, 20 nt, African swine fever virus
  source 1..20: mol_type = genomic RNA
aagcatgtctccaatccggg

SEQ ID NO: 32357 - RNA, 20 nt, African swine fever virus
  source 1..20: mol_type = genomic RNA
ccaagcatgtctccaatccg

SEQ ID NO: 32358 - RNA, 20 nt, African swine fever virus
  source 1..20: mol_type = genomic RNA
cgggagttcgtgcaagcgct

SEQ ID NO: 32359 - RNA, 20 nt, African swine fever virus
  source 1..20: mol_type = genomic RNA
gcgggttgatagggcgtcgt

SEQ ID NO: 32360 - RNA, 20 nt, African swine fever virus
  source 1..20: mol_type = genomic RNA
agcgggttgatagggcgtcg

SEQ ID NO: 32361 - RNA, 20 nt, African swine fever virus
  source 1..20: mol_type = genomic RNA
cggtttcccagcgggttgat

SEQ ID NO: 32362 - RNA, 20 nt, African swine fever virus
  source 1..20: mol_type = genomic RNA
gtatcatacgtgtgggtata

SEQ ID NO: 32363 - RNA, 20 nt, African swine fever virus
  source 1..20: mol_type = genomic RNA
caggttctagctcatcggcg

SEQ ID NO: 32364 - RNA, 20 nt, African swine fever virus
  source 1..20: mol_type = genomic RNA
gctcaggaagcatcgagatc

SEQ ID NO: 32365 - RNA, 20 nt, African swine fever virus
  source 1..20: mol_type = genomic RNA
tccagctcaggaagcatcga

SEQ ID NO: 32366 - RNA, 20 nt, African swine fever virus
  source 1..20: mol_type = genomic RNA
atgttaataagctcaatagg

SEQ ID NO: 32367 - RNA, 20 nt, African swine fever virus
  source 1..20: mol_type = genomic RNA
gcggtttatttcatttacaa

SEQ ID NO: 32368 - RNA, 20 nt, African swine fever virus
  source 1..20: mol_type = genomic RNA
ttcagtgcgtgtgataacgc

SEQ ID NO: 32369 - RNA, 20 nt, African swine fever virus
  source 1..20: mol_type = genomic RNA
attcagtgcgtgtgataacg

SEQ ID NO: 32370 - RNA, 20 nt, African swine fever virus
  source 1..20: mol_type = genomic RNA
aagtcattcatagttcgcgc

SEQ ID NO: 32371 - RNA, 20 nt, African swine fever virus
  source 1..20: mol_type = genomic RNA
atcggagggaagtaattgcg

SEQ ID NO: 32372 - RNA, 20 nt, African swine fever virus
  source 1..20: mol_type = genomic RNA
gtttggacatccacagagtc

SEQ ID NO: 32373 - RNA, 20 nt, African swine fever virus
  source 1..20: mol_type = genomic RNA
aattcttgttgtaggctggg

SEQ ID NO: 32374 - RNA, 20 nt, African swine fever virus
  source 1..20: mol_type = genomic RNA
gtcaataagattggctcggt

SEQ ID NO: 32375 - RNA, 20 nt, African swine fever virus
  source 1..20: mol_type = genomic RNA
agccagtcaataagattggc

SEQ ID NO: 32376 - RNA, 20 nt, African swine fever virus
  source 1..20: mol_type = genomic RNA
taacaaccaatcctggattt

SEQ ID NO: 32377 - RNA, 20 nt, African swine fever virus
  source 1..20: mol_type = genomic RNA
catatggtacaatccaggca

SEQ ID NO: 32378 - RNA, 20 nt, African swine fever virus
  source 1..20: mol_type = genomic RNA
acatatggtacaatccaggc

SEQ ID NO: 32379 - RNA, 20 nt, African swine fever virus
  source 1..20: mol_type = genomic RNA
aatatcttgcggctaattct

SEQ ID NO: 32380 - RNA, 20 nt, African swine fever virus
  source 1..20: mol_type = genomic RNA
gcatcggtgggtggtttaat

SEQ ID NO: 32381 - RNA, 20 nt, African swine fever virus
  source 1..20: mol_type = genomic RNA
cggcatcggtgggtggttta

SEQ ID NO: 32382 - RNA, 20 nt, African swine fever virus
  source 1..20: mol_type = genomic RNA
ggcctaattcaccgccagga

SEQ ID NO: 32383 - RNA, 20 nt, African swine fever virus
  source 1..20: mol_type = genomic RNA
ccaggcctaattcaccgcca

SEQ ID NO: 32384 - RNA, 20 nt, African swine fever virus
  source 1..20: mol_type = genomic RNA
tccaggcctaattcaccgcc

SEQ ID NO: 32385 - RNA, 20 nt, African swine fever virus
  source 1..20: mol_type = genomic RNA
cgaagttgcagtacattata

SEQ ID NO: 32386 - RNA, 20 nt, African swine fever virus
  source 1..20: mol_type = genomic RNA
cctcgaagttgcagtacatt

SEQ ID NO: 32387 - RNA, 20 nt, African swine fever virus
  source 1..20: mol_type = genomic RNA
acctcgaagttgcagtacat

SEQ ID NO: 32388 - RNA, 20 nt, African swine fever virus
  source 1..20: mol_type = genomic RNA
cacctcgaagttgcagtaca

SEQ ID NO: 32389 - RNA, 20 nt, African swine fever virus
  source 1..20: mol_type = genomic RNA
cttgctctacacggagtcca

SEQ ID NO: 32390 - RNA, 20 nt, African swine fever virus
  source 1..20: mol_type = genomic RNA
agtaccacttgctctacacg

SEQ ID NO: 32391 - RNA, 20 nt, African swine fever virus
  source 1..20: mol_type = genomic RNA
tataggcgataacgtcgaag

SEQ ID NO: 32392 - RNA, 20 nt, African swine fever virus
  source 1..20: mol_type = genomic RNA
tagtctgatccatataggcg

SEQ ID NO: 32393 - RNA, 20 nt, African swine fever virus
  source 1..20: mol_type = genomic RNA
ggcaatgtacgaggctacaa

SEQ ID NO: 32394 - RNA, 20 nt, African swine fever virus
  source 1..20: mol_type = genomic RNA
gttggcgaatgcattgataa

SEQ ID NO: 32395 - RNA, 20 nt, African swine fever virus
  source 1..20: mol_type = genomic RNA
aaggcgatgttatcacgtgc

SEQ ID NO: 32396 - RNA, 20 nt, African swine fever virus
  source 1..20: mol_type = genomic RNA
taataagccgctgaagcatg

SEQ ID NO: 32397 - RNA, 20 nt, African swine fever virus
  source 1..20: mol_type = genomic RNA
tggcggttagtatccttaat

SEQ ID NO: 32398 - RNA, 20 nt, African swine fever virus
  source 1..20: mol_type = genomic RNA
catcagattaggacgagcca

SEQ ID NO: 32399 - RNA, 20 nt, African swine fever virus
  source 1..20: mol_type = genomic RNA
acggatagtcctgtcatagg

SEQ ID NO: 32400 - RNA, 20 nt, African swine fever virus
  source 1..20: mol_type = genomic RNA
gaccgacggatagtcctgtc

SEQ ID NO: 32401 - RNA, 20 nt, African swine fever virus
  source 1..20: mol_type = genomic RNA
cctgaccgacggatagtcct

SEQ ID NO: 32402 - RNA, 20 nt, African swine fever virus
  source 1..20: mol_type = genomic RNA
atcgctttcgcacaacatcg

SEQ ID NO: 32403 - RNA, 20 nt, African swine fever virus
  source 1..20: mol_type = genomic RNA
tcgatcactgcgaccaatcg

SEQ ID NO: 32404 - RNA, 20 nt, African swine fever virus
  source 1..20: mol_type = genomic RNA
gtcgatcactgcgaccaatc

SEQ ID NO: 32405 - RNA, 20 nt, African swine fever virus
  source 1..20: mol_type = genomic RNA
ctaatgatcccgtcgatcac

SEQ ID NO: 32406 - RNA, 20 nt, African swine fever virus
  source 1..20: mol_type = genomic RNA
gagtgtgggagcctctaatg

SEQ ID NO: 32407 - RNA, 20 nt, African swine fever virus
  source 1..20: mol_type = genomic RNA
tattgtaccgggacatatag

SEQ ID NO: 32408 - RNA, 20 nt, African swine fever virus
  source 1..20: mol_type = genomic RNA
gctgttataataggtttatc

SEQ ID NO: 32409 - RNA, 20 nt, African swine fever virus
  source 1..20: mol_type = genomic RNA
attcccgctgttataatagg

SEQ ID NO: 32410 - RNA, 20 nt, African swine fever virus
  source 1..20: mol_type = genomic RNA
tattcccgctgttataatag

SEQ ID NO: 32411 - RNA, 20 nt, African swine fever virus
  source 1..20: mol_type = genomic RNA
cttggtaagagctttccacg

SEQ ID NO: 32412 - RNA, 20 nt, African swine fever virus
  source 1..20: mol_type = genomic RNA
agagtgcgtgtttggccttt

SEQ ID NO: 32413 - RNA, 20 nt, African swine fever virus
  source 1..20: mol_type = genomic RNA
cggtgtttagcgatcgtacc

SEQ ID NO: 32414 - RNA, 20 nt, African swine fever virus
  source 1..20: mol_type = genomic RNA
tgctcatcaattcgtttcca

SEQ ID NO: 32415 - RNA, 20 nt, African swine fever virus
  source 1..20: mol_type = genomic RNA
ttgctcatcaattcgtttcc

SEQ ID NO: 32416 - RNA, 20 nt, African swine fever virus
  source 1..20: mol_type = genomic RNA
ggcctgcttcatcatagtca

SEQ ID NO: 32417 - RNA, 20 nt, African swine fever virus
  source 1..20: mol_type = genomic RNA
gggcctgcttcatcatagtc

SEQ ID NO: 32418 - RNA, 20 nt, African swine fever virus
  source 1..20: mol_type = genomic RNA
cgttgaatacctgcggccaa

SEQ ID NO: 32419 - RNA, 20 nt, African swine fever virus
  source 1..20: mol_type = genomic RNA
ttgttcacgtccacgttgaa

SEQ ID NO: 32420 - RNA, 20 nt, African swine fever virus
  source 1..20: mol_type = genomic RNA
cattgttcacgtccacgttg

SEQ ID NO: 32421 - RNA, 20 nt, African swine fever virus
  source 1..20: mol_type = genomic RNA
ccattgttcacgtccacgtt

SEQ ID NO: 32422 - RNA, 20 nt, African swine fever virus
  source 1..20: mol_type = genomic RNA
agctcggtattgctgtgtcc

SEQ ID NO: 32423 - RNA, 20 nt, African swine fever virus
  source 1..20: mol_type = genomic RNA
ttgagtcgcttcatcatcag

SEQ ID NO: 32424 - RNA, 20 nt, African swine fever virus
  source 1..20: mol_type = genomic RNA
tacgaacgggtgctcgtgca

SEQ ID NO: 32425 - RNA, 20 nt, African swine fever virus
  source 1..20: mol_type = genomic RNA
cttgtttaacgatggaccag

SEQ ID NO: 32426 - RNA, 20 nt, African swine fever virus
  source 1..20: mol_type = genomic RNA
acttgtttaacgatggacca

SEQ ID NO: 32427 - RNA, 20 nt, African swine fever virus
  source 1..20: mol_type = genomic RNA
atttgtactaaggtgggctt

SEQ ID NO: 32428 - RNA, 20 nt, African swine fever virus
  source 1..20: mol_type = genomic RNA
gtgatggagaacccgtactc

SEQ ID NO: 32429 - RNA, 20 nt, African swine fever virus
  source 1..20: mol_type = genomic RNA
cgggttctagatctgtcttc

SEQ ID NO: 32430 - RNA, 20 nt, African swine fever virus
  source 1..20: mol_type = genomic RNA
atgacccttatgatttgcca

SEQ ID NO: 32431 - RNA, 20 nt, African swine fever virus
  source 1..20: mol_type = genomic RNA
tcttgctacgactttatttc

SEQ ID NO: 32432 - RNA, 20 nt, African swine fever virus
  source 1..20: mol_type = genomic RNA
gccggcaatgcgctgatgcg

SEQ ID NO: 32433 - RNA, 20 nt, African swine fever virus
  source 1..20: mol_type = genomic RNA
agccggcaatgcgctgatgc

SEQ ID NO: 32434 - RNA, 20 nt, African swine fever virus
  source 1..20: mol_type = genomic RNA
gctggcaacccagccggcaa

SEQ ID NO: 32435 - RNA, 20 nt, African swine fever virus
  source 1..20: mol_type = genomic RNA
ctggtaatccagctggcaac

SEQ ID NO: 32436 - RNA, 20 nt, African swine fever virus
  source 1..20: mol_type = genomic RNA
ctggtaagcccgctggtaat

SEQ ID NO: 32437 - RNA, 20 nt, African swine fever virus
  source 1..20: mol_type = genomic RNA
cagcatcgcaatttgctgag

SEQ ID NO: 32438 - RNA, 20 nt, African swine fever virus
  source 1..20: mol_type = genomic RNA
aatctttatgtctcgcatgc

SEQ ID NO: 32439 - RNA, 20 nt, African swine fever virus
  source 1..20: mol_type = genomic RNA
cggaatagatatcattaagc

SEQ ID NO: 32440 - RNA, 20 nt, African swine fever virus
  source 1..20: mol_type = genomic RNA
acgaggaagtactctttcct

SEQ ID NO: 32441 - RNA, 20 nt, African swine fever virus
  source 1..20: mol_type = genomic RNA
acgtatggcctacgaggaag

SEQ ID NO: 32442 - RNA, 20 nt, African swine fever virus
  source 1..20: mol_type = genomic RNA
gttacctacgtatggcctac

SEQ ID NO: 32443 - RNA, 20 nt, African swine fever virus
  source 1..20: mol_type = genomic RNA
gcggcaagataatggcacca

SEQ ID NO: 32444 - RNA, 20 nt, African swine fever virus
  source 1..20: mol_type = genomic RNA
aggtgaatgaatacctgcgg

SEQ ID NO: 32445 - RNA, 20 nt, African swine fever virus
  source 1..20: mol_type = genomic RNA
agatagtctttatacagagg

SEQ ID NO: 32446 - RNA, 20 nt, African swine fever virus
  source 1..20: mol_type = genomic RNA
gaggagtcaccagttcgggt

SEQ ID NO: 32447 - RNA, 20 nt, African swine fever virus
  source 1..20: mol_type = genomic RNA
ctagccggaggagtcaccag

SEQ ID NO: 32448 - RNA, 20 nt, African swine fever virus
  source 1..20: mol_type = genomic RNA
tgccatggtagacgcgaagc

SEQ ID NO: 32449 - RNA, 20 nt, African swine fever virus
  source 1..20: mol_type = genomic RNA
atcctgggtttaaggaacta

SEQ ID NO: 32450 - RNA, 20 nt, African swine fever virus
  source 1..20: mol_type = genomic RNA
ttcactttaacaatcgtctc

SEQ ID NO: 32451 - RNA, 20 nt, African swine fever virus
  source 1..20: mol_type = genomic RNA
agggtgaatctcttcactac

SEQ ID NO: 32452 - RNA, 20 nt, African swine fever virus
  source 1..20: mol_type = genomic RNA
cactcatcatggcctacaac

SEQ ID NO: 32453 - RNA, 20 nt, African swine fever virus
  source 1..20: mol_type = genomic RNA
atgctatccatgatgagtac

SEQ ID NO: 32454 - RNA, 20 nt, African swine fever virus
  source 1..20: mol_type = genomic RNA
atcgcagagaggtaggaatc

SEQ ID NO: 32455 - RNA, 20 nt, African swine fever virus
  source 1..20: mol_type = genomic RNA
gatcgcagagaggtaggaat

SEQ ID NO: 32456 - RNA, 20 nt, African swine fever virus
  source 1..20: mol_type = genomic RNA
acgtggcctactactgcatt

SEQ ID NO: 32457 - RNA, 20 nt, African swine fever virus
  source 1..20: mol_type = genomic RNA
tctcatgtggaagtattatg

SEQ ID NO: 32458 - RNA, 20 nt, African swine fever virus
  source 1..20: mol_type = genomic RNA
ttgatgtccgcaacatgtgt

SEQ ID NO: 32459 - RNA, 20 nt, African swine fever virus
  source 1..20: mol_type = genomic RNA
acccattgatgtccgcaaca

SEQ ID NO: 32460 - RNA, 20 nt, African swine fever virus
  source 1..20: mol_type = genomic RNA
ggatgcctacccattgatgt

SEQ ID NO: 32461 - RNA, 20 nt, African swine fever virus
  source 1..20: mol_type = genomic RNA
ctggatgcctacccattgat

SEQ ID NO: 32462 - RNA, 20 nt, African swine fever virus
  source 1..20: mol_type = genomic RNA
cagagtggaccaccattcta

SEQ ID NO: 32463 - RNA, 20 nt, African swine fever virus
  source 1..20: mol_type = genomic RNA
ctagcgagcacgtgcatcac

SEQ ID NO: 32464 - RNA, 20 nt, African swine fever virus
  source 1..20: mol_type = genomic RNA
gttaagggaaccgttccgga

SEQ ID NO: 32465 - RNA, 20 nt, African swine fever virus
  source 1..20: mol_type = genomic RNA
tgttaagggaaccgttccgg

SEQ ID NO: 32466 - RNA, 20 nt, African swine fever virus
  source 1..20: mol_type = genomic RNA
atagccctgttaagggaacc

SEQ ID NO: 32467 - RNA, 20 nt, African swine fever virus
  source 1..20: mol_type = genomic RNA
acgatatagagacctatagc

SEQ ID NO: 32468 - RNA, 20 nt, African swine fever virus
  source 1..20: mol_type = genomic RNA
cagcatcgttatggcctacg

SEQ ID NO: 32469 - RNA, 20 nt, African swine fever virus
  source 1..20: mol_type = genomic RNA
cagaccacagcatcgttatg

SEQ ID NO: 32470 - RNA, 20 nt, African swine fever virus
  source 1..20: mol_type = genomic RNA
acagaccacagcatcgttat

SEQ ID NO: 32471 - RNA, 20 nt, African swine fever virus
  source 1..20: mol_type = genomic RNA
cacagaccacagcatcgtta

SEQ ID NO: 32472 - RNA, 20 nt, African swine fever virus
  source 1..20: mol_type = genomic RNA
cgcggcttggtacacaggtt

SEQ ID NO: 32473 - RNA, 20 nt, African swine fever virus
  source 1..20: mol_type = genomic RNA
acgagcctcgcggcttggta

SEQ ID NO: 32474 - RNA, 20 nt, African swine fever virus
  source 1..20: mol_type = genomic RNA
cttacaagttggatacagct

SEQ ID NO: 32475 - RNA, 20 nt, African swine fever virus
  source 1..20: mol_type = genomic RNA
aatggtttcccgagagctaa

SEQ ID NO: 32476 - RNA, 20 nt, African swine fever virus
  source 1..20: mol_type = genomic RNA
gttactaccgaatggtttcc

SEQ ID NO: 32477 - RNA, 20 nt, African swine fever virus
  source 1..20: mol_type = genomic RNA
cggacgacacaacctgttac

SEQ ID NO: 32478 - RNA, 20 nt, African swine fever virus
  source 1..20: mol_type = genomic RNA
ccgcggacgacacaacctgt

SEQ ID NO: 32479 - RNA, 20 nt, African swine fever virus
  source 1..20: mol_type = genomic RNA
tgaagtacgatatggagcct

SEQ ID NO: 32480 - RNA, 20 nt, African swine fever virus
  source 1..20: mol_type = genomic RNA
ttgatatccatgaagtacga

SEQ ID NO: 32481 - RNA, 20 nt, African swine fever virus
  source 1..20: mol_type = genomic RNA
attgatatccatgaagtacg

SEQ ID NO: 32482 - RNA, 20 nt, African swine fever virus
  source 1..20: mol_type = genomic RNA
atgctcctctactattcatg

SEQ ID NO: 32483 - RNA, 20 nt, African swine fever virus
  source 1..20: mol_type = genomic RNA
gtgattacccaacgagttac

SEQ ID NO: 32484 - RNA, 20 nt, African swine fever virus
  source 1..20: mol_type = genomic RNA
ggtgattacccaacgagtta

SEQ ID NO: 32485 - RNA, 20 nt, African swine fever virus
  source 1..20: mol_type = genomic RNA
ttctgagattgttgcacggg

SEQ ID NO: 32486 - RNA, 20 nt, African swine fever virus
  source 1..20: mol_type = genomic RNA
gtaacacatttgcaggcacg

SEQ ID NO: 32487 - RNA, 20 nt, African swine fever virus
  source 1..20: mol_type = genomic RNA
cttaacaataggcgatacgt

SEQ ID NO: 32488 - RNA, 20 nt, African swine fever virus
  source 1..20: mol_type = genomic RNA
ctaccgcttaacaataggcg

SEQ ID NO: 32489 - RNA, 20 nt, African swine fever virus
  source 1..20: mol_type = genomic RNA
gctaccgcttaacaataggc

SEQ ID NO: 32490 - RNA, 20 nt, African swine fever virus
  source 1..20: mol_type = genomic RNA
cgctaccgcttaacaatagg

SEQ ID NO: 32491 - RNA, 20 nt, African swine fever virus
  source 1..20: mol_type = genomic RNA
tagatgcgtcgatgttcagc

SEQ ID NO: 32492 - RNA, 20 nt, African swine fever virus
  source 1..20: mol_type = genomic RNA
ctagcgtgttgaggtctgcc

SEQ ID NO: 32493 - RNA, 20 nt, African swine fever virus
  source 1..20: mol_type = genomic RNA
aggtgacggctaacgtgccg

SEQ ID NO: 32494 - RNA, 20 nt, African swine fever virus
  source 1..20: mol_type = genomic RNA
tggaagttatgtggtgtttg

SEQ ID NO: 32495 - RNA, 20 nt, African swine fever virus
  source 1..20: mol_type = genomic RNA
atatcattaatcgtatgaat

SEQ ID NO: 32496 - RNA, 20 nt, African swine fever virus
  source 1..20: mol_type = genomic RNA
catatcattaatcgtatgaa

SEQ ID NO: 32497 - RNA, 20 nt, African swine fever virus
  source 1..20: mol_type = genomic RNA
gcttgctcgtattcccgcca

SEQ ID NO: 32498 - RNA, 20 nt, African swine fever virus
  source 1..20: mol_type = genomic RNA
ggccgcaacatttgcgtcaa

SEQ ID NO: 32499 - RNA, 20 nt, African swine fever virus
  source 1..20: mol_type = genomic RNA
ccgggccgcaacatttgcgt

SEQ ID NO: 32500 - RNA, 20 nt, African swine fever virus
  source 1..20: mol_type = genomic RNA
accgggccgcaacatttgcg

SEQ ID NO: 32501 - RNA, 20 nt, African swine fever virus
  source 1..20: mol_type = genomic RNA
tagattgtttcccaccgggc

SEQ ID NO: 32502 - RNA, 20 nt, African swine fever virus
  source 1..20: mol_type = genomic RNA
ccgtagattgtttcccaccg

SEQ ID NO: 32503 - RNA, 20 nt, African swine fever virus
  source 1..20: mol_type = genomic RNA
atggtagatgcgaatgttgc

SEQ ID NO: 32504 - RNA, 20 nt, African swine fever virus
  source 1..20: mol_type = genomic RNA
tatggtagatgcgaatgttg

SEQ ID NO: 32505 - RNA, 20 nt, African swine fever virus
  source 1..20: mol_type = genomic RNA
gcgtgtcgtacttgcgcagg

SEQ ID NO: 32506 - RNA, 20 nt, African swine fever virus
  source 1..20: mol_type = genomic RNA
ttgcctgcgtgtcgtacttg

SEQ ID NO: 32507 - RNA, 20 nt, African swine fever virus
  source 1..20: mol_type = genomic RNA
tgcgcttggctggcggcatg

SEQ ID NO: 32508 - RNA, 20 nt, African swine fever virus
  source 1..20: mol_type = genomic RNA
taggacaaggtatgacgcga

SEQ ID NO: 32509 - RNA, 20 nt, African swine fever virus
  source 1..20: mol_type = genomic RNA
tgtggtgtcccactgaagca

SEQ ID NO: 32510 - RNA, 20 nt, African swine fever virus
  source 1..20: mol_type = genomic RNA
gccatgtggtgtcccactga

SEQ ID NO: 32511 - RNA, 20 nt, African swine fever virus
  source 1..20: mol_type = genomic RNA
tcacagggtcatcttcggta

SEQ ID NO: 32512 - RNA, 20 nt, African swine fever virus
  source 1..20: mol_type = genomic RNA
accagttatccttacacata

SEQ ID NO: 32513 - RNA, 20 nt, African swine fever virus
  source 1..20: mol_type = genomic RNA
accgtgtagccgggaatgtt

SEQ ID NO: 32514 - RNA, 20 nt, African swine fever virus
  source 1..20: mol_type = genomic RNA
ctgagggtacgatttcgtac

SEQ ID NO: 32515 - RNA, 20 nt, African swine fever virus
  source 1..20: mol_type = genomic RNA
taggatcaatagtcaatgtt

SEQ ID NO: 32516 - RNA, 20 nt, African swine fever virus
  source 1..20: mol_type = genomic RNA
cggtcgatggtttcaatatc

SEQ ID NO: 32517 - RNA, 20 nt, African swine fever virus
  source 1..20: mol_type = genomic RNA
ccgcgagaatgtgaatataa

SEQ ID NO: 32518 - RNA, 20 nt, African swine fever virus
  source 1..20: mol_type = genomic RNA
actccatatcccatacgtga

SEQ ID NO: 32519 - RNA, 20 nt, African swine fever virus
  source 1..20: mol_type = genomic RNA
tactccatatcccatacgtg

SEQ ID NO: 32520 - RNA, 20 nt, African swine fever virus
  source 1..20: mol_type = genomic RNA
accgggctacgaatctttaa

SEQ ID NO: 32521 - RNA, 20 nt, African swine fever virus
  source 1..20: mol_type = genomic RNA
gtgcctaccgggctacgaat

SEQ ID NO: 32522 - RNA, 20 nt, African swine fever virus
  source 1..20: mol_type = genomic RNA
gtgaaggcattgaactgcaa

SEQ ID NO: 32523 - RNA, 20 nt, African swine fever virus
  source 1..20: mol_type = genomic RNA
agccggtgaaggcattgaac

SEQ ID NO: 32524 - RNA, 20 nt, African swine fever virus
  source 1..20: mol_type = genomic RNA
tgcatgttcgcatatggagt

SEQ ID NO: 32525 - RNA, 20 nt, African swine fever virus
  source 1..20: mol_type = genomic RNA
gccttgcatgttcgcatatg

SEQ ID NO: 32526 - RNA, 20 nt, African swine fever virus
  source 1..20: mol_type = genomic RNA
tatagtgcacatcaacataa

SEQ ID NO: 32527 - RNA, 20 nt, African swine fever virus
  source 1..20: mol_type = genomic RNA
tttgggctccgtatagtgca

SEQ ID NO: 32528 - RNA, 20 nt, African swine fever virus
  source 1..20: mol_type = genomic RNA
gtacaacatatttagcagct

SEQ ID NO: 32529 - RNA, 20 nt, African swine fever virus
  source 1..20: mol_type = genomic RNA
ttctcatcgtataggagggc

SEQ ID NO: 32530 - RNA, 20 nt, African swine fever virus
  source 1..20: mol_type = genomic RNA
tactcctttctcatcgtata

SEQ ID NO: 32531 - RNA, 20 nt, African swine fever virus
  source 1..20: mol_type = genomic RNA
ccatactcctttctcatcgt

SEQ ID NO: 32532 - RNA, 20 nt, African swine fever virus
  source 1..20: mol_type = genomic RNA
gcaagatttgctccttctaa

SEQ ID NO: 32533 - RNA, 20 nt, African swine fever virus
  source 1..20: mol_type = genomic RNA
atccattaagctcttcatcg

SEQ ID NO: 32534 - RNA, 20 nt, African swine fever virus
  source 1..20: mol_type = genomic RNA
ccgtgtaccttatcgcggcc

SEQ ID NO: 32535 - RNA, 20 nt, African swine fever virus
  source 1..20: mol_type = genomic RNA
ctgcgtatactgccgctaca

SEQ ID NO: 32536 - RNA, 20 nt, African swine fever virus
  source 1..20: mol_type = genomic RNA
ctgcgtatgctgccactgcg

SEQ ID NO: 32537 - RNA, 20 nt, African swine fever virus
  source 1..20: mol_type = genomic RNA
ttgcgtatactgccactgcg

SEQ ID NO: 32538 - RNA, 20 nt, African swine fever virus
  source 1..20: mol_type = genomic RNA
ctgcgtatactgccattgcg

SEQ ID NO: 32539 - RNA, 20 nt, African swine fever virus
  source 1..20: mol_type = genomic RNA
cggcgcgtcttaccgctgcg

SEQ ID NO: 32540 - RNA, 20 nt, African swine fever virus
  source 1..20: mol_type = genomic RNA
cggtcattacgtgaactact

SEQ ID NO: 32541 - RNA, 20 nt, African swine fever virus
  source 1..20: mol_type = genomic RNA
tagatgattaataaggcggt

SEQ ID NO: 32542 - RNA, 20 nt, African swine fever virus
  source 1..20: mol_type = genomic RNA
ttggaccgtagatgattaat

SEQ ID NO: 32543 - RNA, 20 nt, African swine fever virus
  source 1..20: mol_type = genomic RNA
gcttagtcttacgctcataa

SEQ ID NO: 32544 - RNA, 20 nt, African swine fever virus
  source 1..20: mol_type = genomic RNA
acattacgaagcgtaagcat

SEQ ID NO: 32545 - RNA, 20 nt, African swine fever virus
  source 1..20: mol_type = genomic RNA
gtgtagtctggcctatagtt

SEQ ID NO: 32546 - RNA, 20 nt, African swine fever virus
  source 1..20: mol_type = genomic RNA
ctacttgcgatgtttcataa

SEQ ID NO: 32547 - RNA, 20 nt, African swine fever virus
  source 1..20: mol_type = genomic RNA
actacttgcgatgtttcata

SEQ ID NO: 32548 - RNA, 20 nt, African swine fever virus
  source 1..20: mol_type = genomic RNA
agtttcccactacttgcgat

SEQ ID NO: 32549 - RNA, 20 nt, African swine fever virus
  source 1..20: mol_type = genomic RNA
gcaataatcgccatctttat

SEQ ID NO: 32550 - RNA, 20 nt, African swine fever virus
  source 1..20: mol_type = genomic RNA
agcaataatcgccatcttta

SEQ ID NO: 32551 - RNA, 20 nt, African swine fever virus
  source 1..20: mol_type = genomic RNA
catgggatgtggtcgcataa

SEQ ID NO: 32552 - RNA, 20 nt, African swine fever virus
  source 1..20: mol_type = genomic RNA
cggccgcatgggatgtggtc

SEQ ID NO: 32553 - RNA, 20 nt, African swine fever virus
  source 1..20: mol_type = genomic RNA
cgaggagcgcgggtttactg

SEQ ID NO: 32554 - RNA, 20 nt, African swine fever virus
  source 1..20: mol_type = genomic RNA
gtcagcgcgacatatactat

SEQ ID NO: 32555 - RNA, 20 nt, African swine fever virus
  source 1..20: mol_type = genomic RNA
ttggccagtcagcgcgacat

SEQ ID NO: 32556 - RNA, 20 nt, African swine fever virus
  source 1..20: mol_type = genomic RNA
tttggccagtcagcgcgaca

SEQ ID NO: 32557 - RNA, 20 nt, African swine fever virus
  source 1..20: mol_type = genomic RNA
gcgaccctttggccagtcag

SEQ ID NO: 32558 - RNA, 20 nt, African swine fever virus
  source 1..20: mol_type = genomic RNA
ccggcgaccctttggccagt

SEQ ID NO: 32559 - RNA, 20 nt, African swine fever virus
  source 1..20: mol_type = genomic RNA
atataatcttgtcggccttc

SEQ ID NO: 32560 - RNA, 20 nt, African swine fever virus
  source 1..20: mol_type = genomic RNA
gctattaagcaagtcttggg

SEQ ID NO: 32561 - RNA, 20 nt, African swine fever virus
  source 1..20: mol_type = genomic RNA
tatgcgggcgtactttattg

SEQ ID NO: 32562 - RNA, 20 nt, African swine fever virus
  source 1..20: mol_type = genomic RNA
gtatgcgggcgtactttatt

SEQ ID NO: 32563 - RNA, 20 nt, African swine fever virus
  source 1..20: mol_type = genomic RNA
aaggtaagcttgtttcccaa

SEQ ID NO: 32564 - RNA, 20 nt, African swine fever virus
  source 1..20: mol_type = genomic RNA
gaatcggagcatcctgccag

SEQ ID NO: 32565 - RNA, 20 nt, African swine fever virus
  source 1..20: mol_type = genomic RNA
tgaatcggagcatcctgcca

SEQ ID NO: 32566 - RNA, 20 nt, African swine fever virus
  source 1..20: mol_type = genomic RNA
atctgggccgtgccctgaat

SEQ ID NO: 32567 - RNA, 20 nt, African swine fever virus
  source 1..20: mol_type = genomic RNA
gtcatatccgttgcgaggaa

SEQ ID NO: 32568 - RNA, 20 nt, African swine fever virus
  source 1..20: mol_type = genomic RNA
agtcatatccgttgcgagga

SEQ ID NO: 32569 - RNA, 20 nt, African swine fever virus
  source 1..20: mol_type = genomic RNA
aagggatctacaagcgtgta

SEQ ID NO: 32570 - RNA, 20 nt, African swine fever virus
  source 1..20: mol_type = genomic RNA
agtttcggtacgcattcttt

SEQ ID NO: 32571 - RNA, 20 nt, African swine fever virus
  source 1..20: mol_type = genomic RNA
tttacatcgaatcttacgtt

SEQ ID NO: 32572 - RNA, 20 nt, African swine fever virus
  source 1..20: mol_type = genomic RNA
aactatattcgtccagggaa

SEQ ID NO: 32573 - RNA, 20 nt, African swine fever virus
  source 1..20: mol_type = genomic RNA
ggccgaccaagtgcttatat

SEQ ID NO: 32574 - RNA, 20 nt, African swine fever virus
  source 1..20: mol_type = genomic RNA
cctggccgaccaagtgctta

SEQ ID NO: 32575 - RNA, 20 nt, African swine fever virus
  source 1..20: mol_type = genomic RNA
atacctcctggccgaccaag

SEQ ID NO: 32576 - RNA, 20 nt, African swine fever virus
  source 1..20: mol_type = genomic RNA
ccgatacctcctggccgacc

SEQ ID NO: 32577 - RNA, 20 nt, African swine fever virus
  source 1..20: mol_type = genomic RNA
ccaccgatacctcctggccg

SEQ ID NO: 32578 - RNA, 20 nt, African swine fever virus
  source 1..20: mol_type = genomic RNA
taataggagtaatatcttgt

SEQ ID NO: 32579 - RNA, 20 nt, African swine fever virus
  source 1..20: mol_type = genomic RNA
gatacgttgcgtccgtaata

SEQ ID NO: 32580 - RNA, 20 nt, African swine fever virus
  source 1..20: mol_type = genomic RNA
tttgcgatgcaagctttatg

SEQ ID NO: 32581 - RNA, 20 nt, African swine fever virus
  source 1..20: mol_type = genomic RNA
atctcggtgttgatgaggat

SEQ ID NO: 32582 - RNA, 20 nt, African swine fever virus
  source 1..20: mol_type = genomic RNA
atatagatgaacatgcgtct

SEQ ID NO: 32583 - RNA, 20 nt, African swine fever virus
  source 1..20: mol_type = genomic RNA
ccgtagtggaagggtatgta

SEQ ID NO: 32584 - RNA, 20 nt, African swine fever virus
  source 1..20: mol_type = genomic RNA
cgtaatccgtgtcccaacta

SEQ ID NO: 32585 - RNA, 20 nt, African swine fever virus
  source 1..20: mol_type = genomic RNA
acgtaatccgtgtcccaact

SEQ ID NO: 32586 - RNA, 20 nt, African swine fever virus
  source 1..20: mol_type = genomic RNA
cacgtaatccgtgtcccaac

SEQ ID NO: 32587 - RNA, 20 nt, African swine fever virus
  source 1..20: mol_type = genomic RNA
caagatcagccgtagtgata

SEQ ID NO: 32588 - RNA, 20 nt, African swine fever virus
  source 1..20: mol_type = genomic RNA
ataccacaagatcagccgta

SEQ ID NO: 32589 - RNA, 20 nt, African swine fever virus
  source 1..20: mol_type = genomic RNA
acagatcgaacccattgtgt

SEQ ID NO: 32590 - RNA, 20 nt, African swine fever virus
  source 1..20: mol_type = genomic RNA
aatgataccacgaatcgacg

SEQ ID NO: 32591 - RNA, 20 nt, African swine fever virus
  source 1..20: mol_type = genomic RNA
gcggaaccaaggtgttgcaa

SEQ ID NO: 32592 - RNA, 20 nt, African swine fever virus
  source 1..20: mol_type = genomic RNA
tgcggaaccaaggtgttgca

SEQ ID NO: 32593 - RNA, 20 nt, African swine fever virus
  source 1..20: mol_type = genomic RNA
aactgcggttgtattcaaga

SEQ ID NO: 32594 - RNA, 20 nt, African swine fever virus
  source 1..20: mol_type = genomic RNA
cgcagtttgggctgcaatgt

SEQ ID NO: 32595 - RNA, 20 nt, African swine fever virus
  source 1..20: mol_type = genomic RNA
acatggtgtttaacaccacg

SEQ ID NO: 32596 - RNA, 20 nt, African swine fever virus
  source 1..20: mol_type = genomic RNA
ataatcccatgctgcaggta

SEQ ID NO: 32597 - RNA, 20 nt, African swine fever virus
  source 1..20: mol_type = genomic RNA
tatcttattagggcgcatag

SEQ ID NO: 32598 - RNA, 20 nt, African swine fever virus
  source 1..20: mol_type = genomic RNA
cgtatgatcaatacaagacc

SEQ ID NO: 32599 - RNA, 20 nt, African swine fever virus
  source 1..20: mol_type = genomic RNA
gaggtggaatatgctgcgaa

SEQ ID NO: 32600 - RNA, 20 nt, African swine fever virus
  source 1..20: mol_type = genomic RNA
caactcttcgtaattatcct

SEQ ID NO: 32601 - RNA, 20 nt, African swine fever virus
  source 1..20: mol_type = genomic RNA
gcaactcttcgtaattatcc

SEQ ID NO: 32602 - RNA, 20 nt, African swine fever virus
  source 1..20: mol_type = genomic RNA
tagcggcccgcaactcttcg

SEQ ID NO: 32603 - RNA, 20 nt, African swine fever virus
  source 1..20: mol_type = genomic RNA
gttgcctaattgaatggatg

SEQ ID NO: 32604 - RNA, 20 nt, African swine fever virus
  source 1..20: mol_type = genomic RNA
aggagtgtccagttgcctaa

SEQ ID NO: 32605 - RNA, 20 nt, African swine fever virus
  source 1..20: mol_type = genomic RNA
gagcatccgggccggtttct

SEQ ID NO: 32606 - RNA, 20 nt, African swine fever virus
  source 1..20: mol_type = genomic RNA
ggagcatccgggccggtttc

SEQ ID NO: 32607 - RNA, 20 nt, African swine fever virus
  source 1..20: mol_type = genomic RNA
cggagcatccgggccggttt

SEQ ID NO: 32608 - RNA, 20 nt, African swine fever virus
  source 1..20: mol_type = genomic RNA
taatcccgctatccgtgtga

SEQ ID NO: 32609 - RNA, 20 nt, African swine fever virus
  source 1..20: mol_type = genomic RNA
ttaatcccgctatccgtgtg

SEQ ID NO: 32610 - RNA, 20 nt, African swine fever virus
  source 1..20: mol_type = genomic RNA
tatcgtatcatcaggcacat

SEQ ID NO: 32611 - RNA, 20 nt, African swine fever virus
  source 1..20: mol_type = genomic RNA
gtatcgtatcatcaggcaca

SEQ ID NO: 32612 - RNA, 20 nt, African swine fever virus
  source 1..20: mol_type = genomic RNA
catatctacccgtatcgtat

SEQ ID NO: 32613 - RNA, 20 nt, African swine fever virus
  source 1..20: mol_type = genomic RNA
acatatctacccgtatcgta

SEQ ID NO: 32614 - RNA, 20 nt, African swine fever virus
  source 1..20: mol_type = genomic RNA
gaatgggtcgttagggccat

SEQ ID NO: 32615 - RNA, 20 nt, African swine fever virus
  source 1..20: mol_type = genomic RNA
tgaatgggtcgttagggcca

SEQ ID NO: 32616 - RNA, 20 nt, African swine fever virus
  source 1..20: mol_type = genomic RNA
catatgaacgatttgagggt

SEQ ID NO: 32617 - RNA, 20 nt, African swine fever virus
  source 1..20: mol_type = genomic RNA
tcatatgaacgatttgaggg

SEQ ID NO: 32618 - RNA, 20 nt, African swine fever virus
  source 1..20: mol_type = genomic RNA
tttgctgtatatcgatcgga

SEQ ID NO: 32619 - RNA, 20 nt, African swine fever virus
  source 1..20: mol_type = genomic RNA
tttgttcagcctttaagcac

SEQ ID NO: 32620 - RNA, 20 nt, African swine fever virus
  source 1..20: mol_type = genomic RNA
cgcggatgtacacaagtttc

SEQ ID NO: 32621 - RNA, 20 nt, African swine fever virus
  source 1..20: mol_type = genomic RNA
aattgctaatgtagtcgcac

SEQ ID NO: 32622 - RNA, 20 nt, African swine fever virus
  source 1..20: mol_type = genomic RNA
cgaatgtggcacgggataat

SEQ ID NO: 32623 - RNA, 20 nt, African swine fever virus
  source 1..20: mol_type = genomic RNA
actggttgaatgtcttctgc

SEQ ID NO: 32624 - RNA, 20 nt, African swine fever virus
  source 1..20: mol_type = genomic RNA
ccgctgtaatgattaaggcc

SEQ ID NO: 32625 - RNA, 20 nt, African swine fever virus
  source 1..20: mol_type = genomic RNA
cccttatatttgtcgtggat

SEQ ID NO: 32626 - RNA, 20 nt, African swine fever virus
  source 1..20: mol_type = genomic RNA
gctttggaccggcaggtatc

SEQ ID NO: 32627 - RNA, 20 nt, African swine fever virus
  source 1..20: mol_type = genomic RNA
gctttggaccggccggcttt

SEQ ID NO: 32628 - RNA, 20 nt, African swine fever virus
  source 1..20: mol_type = genomic RNA
aactggccggctttgaatcg

SEQ ID NO: 32629 - RNA, 20 nt, African swine fever virus
  source 1..20: mol_type = genomic RNA
ataatcggctaacagctttg

SEQ ID NO: 32630 - RNA, 20 nt, African swine fever virus
  source 1..20: mol_type = genomic RNA
cagtaccgggaatttagtat

SEQ ID NO: 32631 - RNA, 20 nt, African swine fever virus
  source 1..20: mol_type = genomic RNA
gatcttgcgcatcgccgtaa

SEQ ID NO: 32632 - RNA, 20 nt, African swine fever virus
  source 1..20: mol_type = genomic RNA
tacgaacaacattgcgccta

SEQ ID NO: 32633 - RNA, 20 nt, African swine fever virus
  source 1..20: mol_type = genomic RNA
tttaagctagccacctgcgg

SEQ ID NO: 32634 - RNA, 20 nt, African swine fever virus
  source 1..20: mol_type = genomic RNA
cgtagacggaaccgaactat

SEQ ID NO: 32635 - RNA, 20 nt, African swine fever virus
  source 1..20: mol_type = genomic RNA
ttatagtgctggcccggcat

SEQ ID NO: 32636 - RNA, 20 nt, African swine fever virus
  source 1..20: mol_type = genomic RNA
acgcaggtagattgtgcgct

SEQ ID NO: 32637 - RNA, 20 nt, African swine fever virus
  source 1..20: mol_type = genomic RNA
gctctatgttcggtttgaca

SEQ ID NO: 32638 - RNA, 20 nt, African swine fever virus
  source 1..20: mol_type = genomic RNA
tgttgcgaatctttgggcgg

SEQ ID NO: 32639 - RNA, 20 nt, African swine fever virus
  source 1..20: mol_type = genomic RNA
tataatgggtttgatacgct

SEQ ID NO: 32640 - RNA, 20 nt, African swine fever virus
  source 1..20: mol_type = genomic RNA
gggcaccaaggtaacaatat

SEQ ID NO: 32641 - RNA, 20 nt, African swine fever virus
  source 1..20: mol_type = genomic RNA
cactggttaacggtactgag

SEQ ID NO: 32642 - RNA, 20 nt, African swine fever virus
  source 1..20: mol_type = genomic RNA
tttccgcactggttaacggt

SEQ ID NO: 32643 - RNA, 20 nt, African swine fever virus
  source 1..20: mol_type = genomic RNA
tcaggataatgggacggata

SEQ ID NO: 32644 - RNA, 20 nt, African swine fever virus
  source 1..20: mol_type = genomic RNA
aaggaatgttgcaactgaca

SEQ ID NO: 32645 - RNA, 20 nt, African swine fever virus
  source 1..20: mol_type = genomic RNA
acactgtatctttatttcgc

SEQ ID NO: 32646 - RNA, 20 nt, African swine fever virus
  source 1..20: mol_type = genomic RNA
aagcgggcccacactgtatc

SEQ ID NO: 32647 - RNA, 20 nt, African swine fever virus
  source 1..20: mol_type = genomic RNA
gagcgctcatctgcgccttg

SEQ ID NO: 32648 - RNA, 20 nt, African swine fever virus
  source 1..20: mol_type = genomic RNA
tgcatggttagcgccagagc

SEQ ID NO: 32649 - RNA, 20 nt, African swine fever virus
  source 1..20: mol_type = genomic RNA
tggacagtgttccttaatcc

SEQ ID NO: 32650 - RNA, 20 nt, African swine fever virus
  source 1..20: mol_type = genomic RNA
cgctgtttagagagtggctt

SEQ ID NO: 32651 - RNA, 20 nt, African swine fever virus
  source 1..20: mol_type = genomic RNA
gcgctgtttagagagtggct

SEQ ID NO: 32652 - RNA, 20 nt, African swine fever virus
  source 1..20: mol_type = genomic RNA
atgtcttcaatcgttcctgt

SEQ ID NO: 32653 - RNA, 20 nt, African swine fever virus
  source 1..20: mol_type = genomic RNA
ccgagttgtttaatgtcaag

SEQ ID NO: 32654 - RNA, 20 nt, African swine fever virus
  source 1..20: mol_type = genomic RNA
gttatttacgttgttatgga

SEQ ID NO: 32655 - RNA, 20 nt, African swine fever virus
  source 1..20: mol_type = genomic RNA
aactccgggagacgttgttt

SEQ ID NO: 32656 - RNA, 20 nt, African swine fever virus
  source 1..20: mol_type = genomic RNA
ggtctgcgagggaggttgga

SEQ ID NO: 32657 - RNA, 20 nt, African swine fever virus
  source 1..20: mol_type = genomic RNA
gtgcgtgactttataatgag

SEQ ID NO: 32658 - RNA, 20 nt, African swine fever virus
  source 1..20: mol_type = genomic RNA
gatccagtgcgtgactttat

SEQ ID NO: 32659 - RNA, 20 nt, African swine fever virus
  source 1..20: mol_type = genomic RNA
actgtttggcctaatatcat

SEQ ID NO: 32660 - RNA, 20 nt, African swine fever virus
  source 1..20: mol_type = genomic RNA
tcagaggcttcgtatggtag

SEQ ID NO: 32661 - RNA, 20 nt, African swine fever virus
  source 1..20: mol_type = genomic RNA
cggttgcatagataaggccc

SEQ ID NO: 32662 - RNA, 20 nt, African swine fever virus
  source 1..20: mol_type = genomic RNA
gcggttgcatagataaggcc

SEQ ID NO: 32663 - RNA, 20 nt, African swine fever virus
  source 1..20: mol_type = genomic RNA
cgcggttgcatagataaggc

SEQ ID NO: 32664 - RNA, 20 nt, African swine fever virus
  source 1..20: mol_type = genomic RNA
ccgcggttgcatagataagg

SEQ ID NO: 32665 - RNA, 20 nt, African swine fever virus
  source 1..20: mol_type = genomic RNA
tcattgtatgtagctgcgcc

SEQ ID NO: 32666 - RNA, 20 nt, African swine fever virus
  source 1..20: mol_type = genomic RNA
caccgtactgtcgtccttcc

SEQ ID NO: 32667 - RNA, 20 nt, African swine fever virus
  source 1..20: mol_type = genomic RNA
gtgggtttccacaccgtact

SEQ ID NO: 32668 - RNA, 20 nt, African swine fever virus
  source 1..20: mol_type = genomic RNA
tttcgcaggcggtcttaatg

SEQ ID NO: 32669 - RNA, 20 nt, African swine fever virus
  source 1..20: mol_type = genomic RNA
tgggacgatcatgaatgttt

SEQ ID NO: 32670 - RNA, 20 nt, African swine fever virus
  source 1..20: mol_type = genomic RNA
gcgcaatcgcctcactatcg

SEQ ID NO: 32671 - RNA, 20 nt, African swine fever virus
  source 1..20: mol_type = genomic RNA
cagattcttaatttccgctt

SEQ ID NO: 32672 - RNA, 20 nt, African swine fever virus
  source 1..20: mol_type = genomic RNA
acagattcttaatttccgct

SEQ ID NO: 32673 - RNA, 20 nt, African swine fever virus
  source 1..20: mol_type = genomic RNA
ctttagcggttaagggattt

SEQ ID NO: 32674 - RNA, 20 nt, African swine fever virus
  source 1..20: mol_type = genomic RNA
gtttccgcaacaaccgtgga

SEQ ID NO: 32675 - RNA, 20 nt, African swine fever virus
  source 1..20: mol_type = genomic RNA
ggatctatgacgtacttcag

SEQ ID NO: 32676 - RNA, 20 nt, African swine fever virus
  source 1..20: mol_type = genomic RNA
gggatctatgacgtacttca

SEQ ID NO: 32677 - RNA, 20 nt, African swine fever virus
  source 1..20: mol_type = genomic RNA
cccgggatctatgacgtact

SEQ ID NO: 32678 - RNA, 20 nt, African swine fever virus
  source 1..20: mol_type = genomic RNA
ttcagggtagtaggtttcaa

SEQ ID NO: 32679 - RNA, 20 nt, African swine fever virus
  source 1..20: mol_type = genomic RNA
gcccattcagggtagtaggt

SEQ ID NO: 32680 - RNA, 20 nt, African swine fever virus
  source 1..20: mol_type = genomic RNA
cccgcccattcagggtagta

SEQ ID NO: 32681 - RNA, 20 nt, African swine fever virus
  source 1..20: mol_type = genomic RNA
ttctttgctcgatacggctt

SEQ ID NO: 32682 - RNA, 20 nt, African swine fever virus
  source 1..20: mol_type = genomic RNA
tttctttgctcgatacggct

SEQ ID NO: 32683 - RNA, 20 nt, African swine fever virus
  source 1..20: mol_type = genomic RNA
taatgatttcaggatactgc

SEQ ID NO: 32684 - RNA, 20 nt, African swine fever virus
  source 1..20: mol_type = genomic RNA
tccgtaatgatttcaggata

SEQ ID NO: 32685 - RNA, 20 nt, African swine fever virus
  source 1..20: mol_type = genomic RNA
gggccttccgtaatgatttc

SEQ ID NO: 32686 - RNA, 20 nt, African swine fever virus
  source 1..20: mol_type = genomic RNA
agggccttccgtaatgattt

SEQ ID NO: 32687 - RNA, 20 nt, African swine fever virus
  source 1..20: mol_type = genomic RNA
cagggccttccgtaatgatt

SEQ ID NO: 32688 - RNA, 20 nt, African swine fever virus
  source 1..20: mol_type = genomic RNA
agctgcgtgagttgaagacc

SEQ ID NO: 32689 - RNA, 20 nt, African swine fever virus
  source 1..20: mol_type = genomic RNA
caacagacacgacggctagg

SEQ ID NO: 32690 - RNA, 20 nt, African swine fever virus
  source 1..20: mol_type = genomic RNA
ttgtttactgtccaatagat

SEQ ID NO: 32691 - RNA, 20 nt, African swine fever virus
  source 1..20: mol_type = genomic RNA
cttcagcaagcatagctccg

SEQ ID NO: 32692 - RNA, 20 nt, African swine fever virus
  source 1..20: mol_type = genomic RNA
acaatggccagctcgtttaa

SEQ ID NO: 32693 - RNA, 20 nt, African swine fever virus
  source 1..20: mol_type = genomic RNA
aggcgttacaatgcacgaag

SEQ ID NO: 32694 - RNA, 20 nt, African swine fever virus
  source 1..20: mol_type = genomic RNA
cgtttacgaatccatcgagg

SEQ ID NO: 32695 - RNA, 20 nt, African swine fever virus
  source 1..20: mol_type = genomic RNA
taggtaaccctatgagctcc

SEQ ID NO: 32696 - RNA, 20 nt, African swine fever virus
  source 1..20: mol_type = genomic RNA
ccataggtaaccctatgagc

SEQ ID NO: 32697 - RNA, 20 nt, African swine fever virus
  source 1..20: mol_type = genomic RNA
ttatgaaggtcatacacgat

SEQ ID NO: 32698 - RNA, 20 nt, African swine fever virus
  source 1..20: mol_type = genomic RNA
tgtctctacgaatagtatgg

SEQ ID NO: 32699 - RNA, 20 nt, African swine fever virus
  source 1..20: mol_type = genomic RNA
ttgagctatcccaggagtta

SEQ ID NO: 32700 - RNA, 20 nt, African swine fever virus
  source 1..20: mol_type = genomic RNA
tattgcccttgagctatccc

SEQ ID NO: 32701 - RNA, 20 nt, African swine fever virus
  source 1..20: mol_type = genomic RNA
acgcggaatggtacaacgcc

SEQ ID NO: 32702 - RNA, 20 nt, African swine fever virus
  source 1..20: mol_type = genomic RNA
aggtcgtgacggcctacgcg

SEQ ID NO: 32703 - RNA, 20 nt, African swine fever virus
  source 1..20: mol_type = genomic RNA
atccgaggtcgtgacggcct

SEQ ID NO: 32704 - RNA, 20 nt, African swine fever virus
  source 1..20: mol_type = genomic RNA
cgctttattcacgagtacat

SEQ ID NO: 32705 - RNA, 20 nt, African swine fever virus
  source 1..20: mol_type = genomic RNA
tggtcgccgcgtccaactat

SEQ ID NO: 32706 - RNA, 20 nt, African swine fever virus
  source 1..20: mol_type = genomic RNA
ccatggtcgccgcgtccaac

SEQ ID NO: 32707 - RNA, 20 nt, African swine fever virus
  source 1..20: mol_type = genomic RNA
ggcgatgtcaccgctcgaga

SEQ ID NO: 32708 - RNA, 20 nt, African swine fever virus
  source 1..20: mol_type = genomic RNA
aacagtgccttcatgcggct

SEQ ID NO: 32709 - RNA, 20 nt, African swine fever virus
  source 1..20: mol_type = genomic RNA
agctcaacatcagccttctt

SEQ ID NO: 32710 - RNA, 20 nt, African swine fever virus
  source 1..20: mol_type = genomic RNA
ccaagctcaacatcagcctt

SEQ ID NO: 32711 - RNA, 20 nt, African swine fever virus
  source 1..20: mol_type = genomic RNA
tggtattgggcgatcactat

SEQ ID NO: 32712 - RNA, 20 nt, African swine fever virus
  source 1..20: mol_type = genomic RNA
tatttcgcggcctgaaggag

SEQ ID NO: 32713 - RNA, 20 nt, African swine fever virus
  source 1..20: mol_type = genomic RNA
gagcacggccatatttcgcg

SEQ ID NO: 32714 - RNA, 20 nt, African swine fever virus
  source 1..20: mol_type = genomic RNA
gaacttgatgctaggctgtg

SEQ ID NO: 32715 - RNA, 20 nt, African swine fever virus
  source 1..20: mol_type = genomic RNA
tcccggccaagctcattaat

SEQ ID NO: 32716 - RNA, 20 nt, African swine fever virus
  source 1..20: mol_type = genomic RNA
ggatgagctgcacatctata

SEQ ID NO: 32717 - RNA, 20 nt, African swine fever virus
  source 1..20: mol_type = genomic RNA
ttatgtattgggcccacaag

SEQ ID NO: 32718 - RNA, 20 nt, African swine fever virus
  source 1..20: mol_type = genomic RNA
atacatccgccaactatcgg

SEQ ID NO: 32719 - RNA, 20 nt, African swine fever virus
  source 1..20: mol_type = genomic RNA
tggccaatacatccgccaac

SEQ ID NO: 32720 - RNA, 20 nt, African swine fever virus
  source 1..20: mol_type = genomic RNA
atggagcaacgtcgtattcg

SEQ ID NO: 32721 - RNA, 20 nt, African swine fever virus
  source 1..20: mol_type = genomic RNA
tatggagcaacgtcgtattc

SEQ ID NO: 32722 - RNA, 20 nt, African swine fever virus
  source 1..20: mol_type = genomic RNA
ctatggagcaacgtcgtatt

SEQ ID NO: 32723 - RNA, 20 nt, African swine fever virus
  source 1..20: mol_type = genomic RNA
cctatggagcaacgtcgtat

SEQ ID NO: 32724 - RNA, 20 nt, African swine fever virus
  source 1..20: mol_type = genomic RNA
gagtattatgtggagtaccc

SEQ ID NO: 32725 - RNA, 20 nt, African swine fever virus
  source 1..20: mol_type = genomic RNA
gcttcctccagagtattatg

SEQ ID NO: 32726 - RNA, 20 nt, African swine fever virus
  source 1..20: mol_type = genomic RNA
gaagctcggtatttacataa

SEQ ID NO: 32727 - RNA, 20 nt, African swine fever virus
  source 1..20: mol_type = genomic RNA
tattaatgctacatgatccc

SEQ ID NO: 32728 - RNA, 20 nt, African swine fever virus
  source 1..20: mol_type = genomic RNA
accgacgaccactcactctc

SEQ ID NO: 32729 - RNA, 20 nt, African swine fever virus
  source 1..20: mol_type = genomic RNA
gaccgacgaccactcactct

SEQ ID NO: 32730 - RNA, 20 nt, African swine fever virus
  source 1..20: mol_type = genomic RNA
gtctattgcgcggcagacat

SEQ ID NO: 32731 - RNA, 20 nt, African swine fever virus
  source 1..20: mol_type = genomic RNA
tgtaaggcctgtctattgcg

SEQ ID NO: 32732 - RNA, 20 nt, African swine fever virus
  source 1..20: mol_type = genomic RNA
tacgaatgaacaaggaagcc

SEQ ID NO: 32733 - RNA, 20 nt, African swine fever virus
  source 1..20: mol_type = genomic RNA
tcgctcctctacggctcctc

SEQ ID NO: 32734 - RNA, 20 nt, African swine fever virus
  source 1..20: mol_type = genomic RNA
tacagcacgatgccaccgta

SEQ ID NO: 32735 - RNA, 20 nt, African swine fever virus
  source 1..20: mol_type = genomic RNA
cgctatcacggctttgccat

SEQ ID NO: 32736 - RNA, 20 nt, African swine fever virus
  source 1..20: mol_type = genomic RNA
cgcgctatcacggctttgcc

SEQ ID NO: 32737 - RNA, 20 nt, African swine fever virus
  source 1..20: mol_type = genomic RNA
ccgcgctatcacggctttgc

SEQ ID NO: 32738 - RNA, 20 nt, African swine fever virus
  source 1..20: mol_type = genomic RNA
cccgcgctatcacggctttg

SEQ ID NO: 32739 - RNA, 20 nt, African swine fever virus
  source 1..20: mol_type = genomic RNA
actcgggtctcatgttggac

SEQ ID NO: 32740 - RNA, 20 nt, African swine fever virus
  source 1..20: mol_type = genomic RNA
tttgactcgagagctttcag

SEQ ID NO: 32741 - RNA, 20 nt, African swine fever virus
  source 1..20: mol_type = genomic RNA
ttcagctcaccgctcagcgc

SEQ ID NO: 32742 - RNA, 20 nt, African swine fever virus
  source 1..20: mol_type = genomic RNA
cgataccattcagctcaccg

SEQ ID NO: 32743 - RNA, 20 nt, African swine fever virus
  source 1..20: mol_type = genomic RNA
ggcgtgccactcgatataga

SEQ ID NO: 32744 - RNA, 20 nt, African swine fever virus
  source 1..20: mol_type = genomic RNA
cagagggcgtattgcgtatg

SEQ ID NO: 32745 - RNA, 20 nt, African swine fever virus
  source 1..20: mol_type = genomic RNA
catattcctccacgaggtca

SEQ ID NO: 32746 - RNA, 20 nt, African swine fever virus
  source 1..20: mol_type = genomic RNA
cactgtcgacgaagttctcc

SEQ ID NO: 32747 - RNA, 20 nt, African swine fever virus
  source 1..20: mol_type = genomic RNA
cgatctcgtccttgtcctcg

SEQ ID NO: 32748 - RNA, 20 nt, African swine fever virus
  source 1..20: mol_type = genomic RNA
tcgcagatggacggagactc

SEQ ID NO: 32749 - RNA, 20 nt, African swine fever virus
  source 1..20: mol_type = genomic RNA
atgtttgcgacgaggcctgc

SEQ ID NO: 32750 - RNA, 20 nt, African swine fever virus
  source 1..20: mol_type = genomic RNA
actgttgcgctctaacggcg

SEQ ID NO: 32751 - RNA, 20 nt, African swine fever virus
  source 1..20: mol_type = genomic RNA
ttaattgccaactgttgcgc

SEQ ID NO: 32752 - RNA, 20 nt, African swine fever virus
  source 1..20: mol_type = genomic RNA
tgatgcagcgcatgacgagc

SEQ ID NO: 32753 - RNA, 20 nt, African swine fever virus
  source 1..20: mol_type = genomic RNA
tcgggtgttaccttgatgca

SEQ ID NO: 32754 - RNA, 20 nt, African swine fever virus
  source 1..20: mol_type = genomic RNA
actttaagtctctttatgag

SEQ ID NO: 32755 - RNA, 20 nt, African swine fever virus
  source 1..20: mol_type = genomic RNA
ttgtgattgctacgatgtat

SEQ ID NO: 32756 - RNA, 20 nt, African swine fever virus
  source 1..20: mol_type = genomic RNA
atagacagctttattaatag

SEQ ID NO: 32757 - RNA, 20 nt, African swine fever virus
  source 1..20: mol_type = genomic RNA
ggtacaacaacatcgggtca

SEQ ID NO: 32758 - RNA, 20 nt, African swine fever virus
  source 1..20: mol_type = genomic RNA
actcaagtgactatagctct

SEQ ID NO: 32759 - RNA, 20 nt, African swine fever virus
  source 1..20: mol_type = genomic RNA
gcgcgatttggacaaggcca

SEQ ID NO: 32760 - RNA, 20 nt, African swine fever virus
  source 1..20: mol_type = genomic RNA
atcaccagcgcgatttggac

SEQ ID NO: 32761 - RNA, 20 nt, African swine fever virus
  source 1..20: mol_type = genomic RNA
atagctcctatcaccagcgc

SEQ ID NO: 32762 - RNA, 20 nt, African swine fever virus
  source 1..20: mol_type = genomic RNA
caatctccacggcatttgcc

SEQ ID NO: 32763 - RNA, 20 nt, African swine fever virus
  source 1..20: mol_type = genomic RNA
aagccgcctcaatctccacg

SEQ ID NO: 32764 - RNA, 20 nt, African swine fever virus
  source 1..20: mol_type = genomic RNA
ttaagatgcagggcataatc

SEQ ID NO: 32765 - RNA, 20 nt, African swine fever virus
  source 1..20: mol_type = genomic RNA
ctccgggaccttgcaggtaa

SEQ ID NO: 32766 - RNA, 20 nt, African swine fever virus
  source 1..20: mol_type = genomic RNA
gcgcgggataggctttgggc

SEQ ID NO: 32767 - RNA, 20 nt, African swine fever virus
  source 1..20: mol_type = genomic RNA
ggttgtacgtcgctaacacc

SEQ ID NO: 32768 - RNA, 20 nt, African swine fever virus
  source 1..20: mol_type = genomic RNA
tgtagggctcacatatctca

SEQ ID NO: 32769 - RNA, 20 nt, African swine fever virus
  source 1..20: mol_type = genomic RNA
gtgaacaacttagtacgcgc

SEQ ID NO: 32770 - RNA, 20 nt, African swine fever virus
  source 1..20: mol_type = genomic RNA
ttgcccggataataattata

SEQ ID NO: 32771 - RNA, 20 nt, African swine fever virus
  source 1..20: mol_type = genomic RNA
cagcatcgcgaactacatcg

SEQ ID NO: 32772 - RNA, 20 nt, African swine fever virus
  source 1..20: mol_type = genomic RNA
tacactgcggaagtttatca

SEQ ID NO: 32773 - RNA, 20 nt, African swine fever virus
  source 1..20: mol_type = genomic RNA
ttacactgcggaagtttatc

SEQ ID NO: 32774 - RNA, 20 nt, African swine fever virus
  source 1..20: mol_type = genomic RNA
ttgtgacgcccttacactgc

SEQ ID NO: 32775 - RNA, 20 nt, African swine fever virus
  source 1..20: mol_type = genomic RNA
gtcgttctagatacttattg

SEQ ID NO: 32776 - RNA, 20 nt, African swine fever virus
  source 1..20: mol_type = genomic RNA
aacagttcaaggtcctgtcg

SEQ ID NO: 32777 - RNA, 20 nt, African swine fever virus
  source 1..20: mol_type = genomic RNA
atgcaacaggaatcgttctt

SEQ ID NO: 32778 - RNA, 20 nt, African swine fever virus
  source 1..20: mol_type = genomic RNA
tttcttgttgggatcggcgg

SEQ ID NO: 32779 - RNA, 20 nt, African swine fever virus
  source 1..20: mol_type = genomic RNA
tccatttcttgttgggatcg

SEQ ID NO: 32780 - RNA, 20 nt, African swine fever virus
  source 1..20: mol_type = genomic RNA
catacatgggaatgaggtcc

SEQ ID NO: 32781 - RNA, 20 nt, African swine fever virus
  source 1..20: mol_type = genomic RNA
gagcctcatacatgggaatg

SEQ ID NO: 32782 - RNA, 20 nt, African swine fever virus
  source 1..20: mol_type = genomic RNA
ctgtggctatatgagcaaca

SEQ ID NO: 32783 - RNA, 20 nt, African swine fever virus
  source 1..20: mol_type = genomic RNA
agggtcgtacatttgaagat

SEQ ID NO: 32784 - RNA, 20 nt, African swine fever virus
  source 1..20: mol_type = genomic RNA
acgtagtatgctttctttgg

SEQ ID NO: 32785 - RNA, 20 nt, African swine fever virus
  source 1..20: mol_type = genomic RNA
tgcaattaagcttgagcggc

SEQ ID NO: 32786 - RNA, 20 nt, African swine fever virus
  source 1..20: mol_type = genomic RNA
aaccatgcaattaagcttga

SEQ ID NO: 32787 - RNA, 20 nt, African swine fever virus
  source 1..20: mol_type = genomic RNA
actaccatttcaacccaacc

SEQ ID NO: 32788 - RNA, 20 nt, African swine fever virus
  source 1..20: mol_type = genomic RNA
gaacaatatgacctactacc

SEQ ID NO: 32789 - RNA, 20 nt, African swine fever virus
  source 1..20: mol_type = genomic RNA
atgctatggcgcctacgtgt

SEQ ID NO: 32790 - RNA, 20 nt, African swine fever virus
  source 1..20: mol_type = genomic RNA
ggtattatttcgcgatccag

SEQ ID NO: 32791 - RNA, 20 nt, African swine fever virus
  source 1..20: mol_type = genomic RNA
gccgggtattatttcgcgat

SEQ ID NO: 32792 - RNA, 20 nt, African swine fever virus
  source 1..20: mol_type = genomic RNA
tgccgggtattatttcgcga

SEQ ID NO: 32793 - RNA, 20 nt, African swine fever virus
  source 1..20: mol_type = genomic RNA
tcaatccctgccgggtatta

SEQ ID NO: 32794 - RNA, 20 nt, African swine fever virus
  source 1..20: mol_type = genomic RNA
ttcaatccctgccgggtatt

SEQ ID NO: 32795 - RNA, 20 nt, African swine fever virus
  source 1..20: mol_type = genomic RNA
cagagtacgttggctacacc

SEQ ID NO: 32796 - RNA, 20 nt, African swine fever virus
  source 1..20: mol_type = genomic RNA
ttatgattaccacagagtac

SEQ ID NO: 32797 - RNA, 20 nt, African swine fever virus
  source 1..20: mol_type = genomic RNA
tatggcgggaggtgtttatt

SEQ ID NO: 32798 - RNA, 20 nt, African swine fever virus
  source 1..20: mol_type = genomic RNA
taacgattcgagaggtccta

SEQ ID NO: 32799 - RNA, 20 nt, African swine fever virus
  source 1..20: mol_type = genomic RNA
ctaacgattcgagaggtcct

SEQ ID NO: 32800 - RNA, 20 nt, African swine fever virus
  source 1..20: mol_type = genomic RNA
taaggacttactagggtact

SEQ ID NO: 32801 - RNA, 20 nt, African swine fever virus
  source 1..20: mol_type = genomic RNA
ataaggacttactagggtac

SEQ ID NO: 32802 - RNA, 20 nt, African swine fever virus
  source 1..20: mol_type = genomic RNA
cattgcggcacgagatctag

SEQ ID NO: 32803 - RNA, 20 nt, African swine fever virus
  source 1..20: mol_type = genomic RNA
gaacctcattgcggcacgag

SEQ ID NO: 32804 - RNA, 20 nt, African swine fever virus
  source 1..20: mol_type = genomic RNA
ttatcctgaacctcattgcg

SEQ ID NO: 32805 - RNA, 20 nt, African swine fever virus
  source 1..20: mol_type = genomic RNA
acccttcatagaggcttata

SEQ ID NO: 32806 - RNA, 20 nt, African swine fever virus
  source 1..20: mol_type = genomic RNA
cctatcaatcacacgatggc

SEQ ID NO: 32807 - RNA, 20 nt, African swine fever virus
  source 1..20: mol_type = genomic RNA
tgatagcgaggagcctgagt

SEQ ID NO: 32808 - RNA, 20 nt, African swine fever virus
  source 1..20: mol_type = genomic RNA
atgcagcagtcaggttatac

SEQ ID NO: 32809 - RNA, 20 nt, African swine fever virus
  source 1..20: mol_type = genomic RNA
cactgctgcgctattcgggt

SEQ ID NO: 32810 - RNA, 20 nt, African swine fever virus
  source 1..20: mol_type = genomic RNA
atggatgtttgagcagtatg

SEQ ID NO: 32811 - RNA, 20 nt, African swine fever virus
  source 1..20: mol_type = genomic RNA
gatgcaattatgcttaccat

SEQ ID NO: 32812 - RNA, 20 nt, African swine fever virus
  source 1..20: mol_type = genomic RNA
aaccagatgcaattatgctt

SEQ ID NO: 32813 - RNA, 20 nt, African swine fever virus
  source 1..20: mol_type = genomic RNA
atatgataatattagcaagc

SEQ ID NO: 32814 - RNA, 20 nt, African swine fever virus
  source 1..20: mol_type = genomic RNA
tctacgaactatactcccga

SEQ ID NO: 32815 - RNA, 20 nt, African swine fever virus
  source 1..20: mol_type = genomic RNA
cagtacatatcctattatac

SEQ ID NO: 32816 - RNA, 20 nt, African swine fever virus
  source 1..20: mol_type = genomic RNA
gcggctagaatttattatac

SEQ ID NO: 32817 - RNA, 20 nt, African swine fever virus
  source 1..20: mol_type = genomic RNA
ataagactgctatgaatcaa

SEQ ID NO: 32818 - RNA, 20 nt, African swine fever virus
  source 1..20: mol_type = genomic RNA
agtatgatttaccttatcta

SEQ ID NO: 32819 - RNA, 20 nt, African swine fever virus
  source 1..20: mol_type = genomic RNA
ggaattcagagtcaagttcc

SEQ ID NO: 32820 - RNA, 20 nt, African swine fever virus
  source 1..20: mol_type = genomic RNA
gaatactacggctatatagg

SEQ ID NO: 32821 - RNA, 20 nt, African swine fever virus
  source 1..20: mol_type = genomic RNA
attactgctatacgattgga

SEQ ID NO: 32822 - RNA, 20 nt, African swine fever virus
  source 1..20: mol_type = genomic RNA
gattactgctatacgattgg

SEQ ID NO: 32823 - RNA, 20 nt, African swine fever virus
  source 1..20: mol_type = genomic RNA
agcttgtatacgaattgcta

SEQ ID NO: 32824 - RNA, 20 nt, African swine fever virus
  source 1..20: mol_type = genomic RNA
tcgccgagcttgtatacgaa

SEQ ID NO: 32825 - RNA, 20 nt, African swine fever virus
  source 1..20: mol_type = genomic RNA
cggatatgatgtgagtaact

SEQ ID NO: 32826 - RNA, 20 nt, African swine fever virus
  source 1..20: mol_type = genomic RNA
acggatatgatgtgagtaac

SEQ ID NO: 32827 - RNA, 20 nt, African swine fever virus
  source 1..20: mol_type = genomic RNA
agcaagtacccacggatatg

SEQ ID NO: 32828 - RNA, 20 nt, African swine fever virus
  source 1..20: mol_type = genomic RNA
ctcctggtgcctagcaagta

SEQ ID NO: 32829 - RNA, 20 nt, African swine fever virus
  source 1..20: mol_type = genomic RNA
ggatggcacccttctcacaa

SEQ ID NO: 32830 - RNA, 20 nt, African swine fever virus
  source 1..20: mol_type = genomic RNA
ttcaacaggcgacccgtcaa

SEQ ID NO: 32831 - RNA, 20 nt, African swine fever virus
  source 1..20: mol_type = genomic RNA
tttcaacaggcgacccgtca

SEQ ID NO: 32832 - RNA, 20 nt, African swine fever virus
  source 1..20: mol_type = genomic RNA
gcgccctttcaacaggcgac

SEQ ID NO: 32833 - RNA, 20 nt, African swine fever virus
  source 1..20: mol_type = genomic RNA
cctgcgccctttcaacaggc

SEQ ID NO: 32834 - RNA, 20 nt, African swine fever virus
  source 1..20: mol_type = genomic RNA
tgtgcaccgggttgttcttt

SEQ ID NO: 32835 - RNA, 20 nt, African swine fever virus
  source 1..20: mol_type = genomic RNA
tcccaccatgtgcaccgggt

SEQ ID NO: 32836 - RNA, 20 nt, African swine fever virus
  source 1..20: mol_type = genomic RNA
actttcgacgttacagacca

SEQ ID NO: 32837 - RNA, 20 nt, African swine fever virus
  source 1..20: mol_type = genomic RNA
cggtggactatttgcgcgat

SEQ ID NO: 32838 - RNA, 20 nt, African swine fever virus
  source 1..20: mol_type = genomic RNA
cattattgagcgataagata

SEQ ID NO: 32839 - RNA, 20 nt, African swine fever virus
  source 1..20: mol_type = genomic RNA
tgggcatggatagatcgggc

SEQ ID NO: 32840 - RNA, 20 nt, African swine fever virus
  source 1..20: mol_type = genomic RNA
aggtttcaggcgagaaggag

SEQ ID NO: 32841 - RNA, 20 nt, African swine fever virus
  source 1..20: mol_type = genomic RNA
gaggcgacgtagcccaaggt

SEQ ID NO: 32842 - RNA, 20 nt, African swine fever virus
  source 1..20: mol_type = genomic RNA
gctatgcccgccgctccgca

SEQ ID NO: 32843 - RNA, 20 nt, African swine fever virus
  source 1..20: mol_type = genomic RNA
attaatgagccagctatgcc

SEQ ID NO: 32844 - RNA, 20 nt, African swine fever virus
  source 1..20: mol_type = genomic RNA
ctgctagccgattaatgagc

SEQ ID NO: 32845 - RNA, 20 nt, African swine fever virus
  source 1..20: mol_type = genomic RNA
tctcctctgctagccgatta

SEQ ID NO: 32846 - RNA, 20 nt, African swine fever virus
  source 1..20: mol_type = genomic RNA
cggtttcaacgatattagat

SEQ ID NO: 32847 - RNA, 20 nt, African swine fever virus
  source 1..20: mol_type = genomic RNA
gttcaatctcctcggtttca

SEQ ID NO: 32848 - RNA, 20 nt, African swine fever virus
  source 1..20: mol_type = genomic RNA
agtacatcgtagacaactct

SEQ ID NO: 32849 - RNA, 20 nt, African swine fever virus
  source 1..20: mol_type = genomic RNA
gggacaccgagtacatcgta

SEQ ID NO: 32850 - RNA, 20 nt, African swine fever virus
  source 1..20: mol_type = genomic RNA
tttcacgctgttcagcatgt

SEQ ID NO: 32851 - RNA, 20 nt, African swine fever virus
  source 1..20: mol_type = genomic RNA
gctgcagaatcatttgctcc

SEQ ID NO: 32852 - RNA, 20 nt, African swine fever virus
  source 1..20: mol_type = genomic RNA
ccgtgagcttcatgtccacc

SEQ ID NO: 32853 - RNA, 20 nt, African swine fever virus
  source 1..20: mol_type = genomic RNA
gggtaatgacctccgtgagc

SEQ ID NO: 32854 - RNA, 20 nt, African swine fever virus
  source 1..20: mol_type = genomic RNA
tccattgtaagaatttcacg

SEQ ID NO: 32855 - RNA, 20 nt, African swine fever virus
  source 1..20: mol_type = genomic RNA
gcttgagatgagcacatgcg

SEQ ID NO: 32856 - RNA, 20 nt, African swine fever virus
  source 1..20: mol_type = genomic RNA
cgtattgaagacccgaacgc

SEQ ID NO: 32857 - RNA, 20 nt, African swine fever virus
  source 1..20: mol_type = genomic RNA
tgtagagtacacgaatactt

SEQ ID NO: 32858 - RNA, 20 nt, African swine fever virus
  source 1..20: mol_type = genomic RNA
cttgaagctgtataagcatg

SEQ ID NO: 32859 - RNA, 20 nt, African swine fever virus
  source 1..20: mol_type = genomic RNA
catctgccgtacgatcctct

SEQ ID NO: 32860 - RNA, 20 nt, African swine fever virus
  source 1..20: mol_type = genomic RNA
acatctgccgtacgatcctc

SEQ ID NO: 32861 - RNA, 20 nt, African swine fever virus
  source 1..20: mol_type = genomic RNA
atgacgcccacatctgccgt

SEQ ID NO: 32862 - RNA, 20 nt, African swine fever virus
  source 1..20: mol_type = genomic RNA
gcacgctaagcccttgtagc

SEQ ID NO: 32863 - RNA, 20 nt, African swine fever virus
  source 1..20: mol_type = genomic RNA
tggtgtcgtcctgcacgcta

SEQ ID NO: 32864 - RNA, 20 nt, African swine fever virus
  source 1..20: mol_type = genomic RNA
cagtggcagcataatcatac

SEQ ID NO: 32865 - RNA, 20 nt, African swine fever virus
  source 1..20: mol_type = genomic RNA
tcaatacgggccacagtggc

SEQ ID NO: 32866 - RNA, 20 nt, African swine fever virus
  source 1..20: mol_type = genomic RNA
tggcttatgcatagggatgc

SEQ ID NO: 32867 - RNA, 20 nt, African swine fever virus
  source 1..20: mol_type = genomic RNA
gggtacgtcctatcacggtt

SEQ ID NO: 32868 - RNA, 20 nt, African swine fever virus
  source 1..20: mol_type = genomic RNA
agtccgttggtcggctcttc

SEQ ID NO: 32869 - RNA, 20 nt, African swine fever virus
  source 1..20: mol_type = genomic RNA
ctttcatcatatagggttga

SEQ ID NO: 32870 - RNA, 20 nt, African swine fever virus
  source 1..20: mol_type = genomic RNA
cctcatgttgtagcacgtgg

SEQ ID NO: 32871 - RNA, 20 nt, African swine fever virus
  source 1..20: mol_type = genomic RNA
acctcatgttgtagcacgtg

SEQ ID NO: 32872 - RNA, 20 nt, African swine fever virus
  source 1..20: mol_type = genomic RNA
taatcgaaggtccatggctc

SEQ ID NO: 32873 - RNA, 20 nt, African swine fever virus
  source 1..20: mol_type = genomic RNA
ctatcacagcaggactgata

SEQ ID NO: 32874 - RNA, 20 nt, African swine fever virus
  source 1..20: mol_type = genomic RNA
gatgtctgcgtaggagcgcc

SEQ ID NO: 32875 - RNA, 20 nt, African swine fever virus
  source 1..20: mol_type = genomic RNA
tgatgtctgcgtaggagcgc

SEQ ID NO: 32876 - RNA, 20 nt, African swine fever virus
  source 1..20: mol_type = genomic RNA
ccatgagccttggatcatcc

SEQ ID NO: 32877 - RNA, 20 nt, African swine fever virus
  source 1..20: mol_type = genomic RNA
ttcaacatgcataggaggct

SEQ ID NO: 32878 - RNA, 20 nt, African swine fever virus
  source 1..20: mol_type = genomic RNA
tttcctcatacgacagatgc

SEQ ID NO: 32879 - RNA, 20 nt, African swine fever virus
  source 1..20: mol_type = genomic RNA
gtcaataatgtcttcgccaa

SEQ ID NO: 32880 - RNA, 20 nt, African swine fever virus
  source 1..20: mol_type = genomic RNA
ttgcacgaagtatcagatga

SEQ ID NO: 32881 - RNA, 20 nt, African swine fever virus
  source 1..20: mol_type = genomic RNA
atgtaaccgatgatagccaa

SEQ ID NO: 32882 - RNA, 20 nt, African swine fever virus
  source 1..20: mol_type = genomic RNA
tacgattaagttgggaatga

SEQ ID NO: 32883 - RNA, 20 nt, African swine fever virus
  source 1..20: mol_type = genomic RNA
tagctcatttggttagtgga

SEQ ID NO: 32884 - RNA, 20 nt, African swine fever virus
  source 1..20: mol_type = genomic RNA
cggatgaagagctatgcatc

SEQ ID NO: 32885 - RNA, 20 nt, African swine fever virus
  source 1..20: mol_type = genomic RNA
cacggatgaagagctatgca

SEQ ID NO: 32886 - RNA, 20 nt, African swine fever virus
  source 1..20: mol_type = genomic RNA
atatcccgccattatctaca

SEQ ID NO: 32887 - RNA, 20 nt, African swine fever virus
  source 1..20: mol_type = genomic RNA
ttactacccaatatcccgcc

SEQ ID NO: 32888 - RNA, 20 nt, African swine fever virus
  source 1..20: mol_type = genomic RNA
gttactacccaatatcccgc

SEQ ID NO: 32889 - RNA, 20 nt, African swine fever virus
  source 1..20: mol_type = genomic RNA
agtatcccgttactacccaa

SEQ ID NO: 32890 - RNA, 20 nt, African swine fever virus
  source 1..20: mol_type = genomic RNA
ctacctagtatcccgttact

SEQ ID NO: 32891 - RNA, 20 nt, African swine fever virus
  source 1..20: mol_type = genomic RNA
aaccactacctagtatcccg

SEQ ID NO: 32892 - RNA, 20 nt, African swine fever virus
  source 1..20: mol_type = genomic RNA
tgtccttcacctgaatccta

SEQ ID NO: 32893 - RNA, 20 nt, African swine fever virus
  source 1..20: mol_type = genomic RNA
aagccatgcccgccacccaa

SEQ ID NO: 32894 - RNA, 20 nt, African swine fever virus
  source 1..20: mol_type = genomic RNA
tcaacacaaccactcaaccc

SEQ ID NO: 32895 - RNA, 20 nt, African swine fever virus
  source 1..20: mol_type = genomic RNA
atttactacatgcgtccctc

SEQ ID NO: 32896 - RNA, 20 nt, African swine fever virus
  source 1..20: mol_type = genomic RNA
aagccttacagtcgttatca

SEQ ID NO: 32897 - RNA, 20 nt, African swine fever virus
  source 1..20: mol_type = genomic RNA
tctcccagagaaccattact

SEQ ID NO: 32898 - RNA, 20 nt, African swine fever virus
  source 1..20: mol_type = genomic RNA
aatgattgggttggatataa

SEQ ID NO: 32899 - RNA, 20 nt, African swine fever virus
  source 1..20: mol_type = genomic RNA
ctcagggatctgttgcctaa

SEQ ID NO: 32900 - RNA, 20 nt, African swine fever virus
  source 1..20: mol_type = genomic RNA
cgtagacctaagtctttacc

SEQ ID NO: 32901 - RNA, 20 nt, African swine fever virus
  source 1..20: mol_type = genomic RNA
tcgtagacctaagtctttac

SEQ ID NO: 32902 - RNA, 20 nt, African swine fever virus
  source 1..20: mol_type = genomic RNA
ctcgtagacctaagtcttta

SEQ ID NO: 32903 - RNA, 20 nt, African swine fever virus
  source 1..20: mol_type = genomic RNA
atttactcccaaggaagaac

SEQ ID NO: 32904 - RNA, 20 nt, African swine fever virus
  source 1..20: mol_type = genomic RNA
ctcggcccacgaactctgaa

SEQ ID NO: 32905 - RNA, 20 nt, African swine fever virus
  source 1..20: mol_type = genomic RNA
cctctcggcccacgaactct

SEQ ID NO: 32906 - RNA, 20 nt, African swine fever virus
  source 1..20: mol_type = genomic RNA
aacctacctcctctcggccc

SEQ ID NO: 32907 - RNA, 20 nt, African swine fever virus
  source 1..20: mol_type = genomic RNA
tctatataccgctgacggag

SEQ ID NO: 32908 - RNA, 20 nt, African swine fever virus
  source 1..20: mol_type = genomic RNA
tccatctatataccgctgac

SEQ ID NO: 32909 - RNA, 20 nt, African swine fever virus
  source 1..20: mol_type = genomic RNA
gataactggctgatgcaatc

SEQ ID NO: 32910 - RNA, 20 nt, African swine fever virus
  source 1..20: mol_type = genomic RNA
ctatggtctttatcagtgca

SEQ ID NO: 32911 - RNA, 20 nt, African swine fever virus
  source 1..20: mol_type = genomic RNA
tggaagaccactatggtctt

SEQ ID NO: 32912 - RNA, 20 nt, African swine fever virus
  source 1..20: mol_type = genomic RNA
ggcacacccattacacctcc

SEQ ID NO: 32913 - RNA, 20 nt, African swine fever virus
  source 1..20: mol_type = genomic RNA
gttggcgctgcaacactcca

SEQ ID NO: 32914 - RNA, 20 nt, African swine fever virus
  source 1..20: mol_type = genomic RNA
tgttggcgctgcaacactcc

SEQ ID NO: 32915 - RNA, 20 nt, African swine fever virus
  source 1..20: mol_type = genomic RNA
ctgttggcgctgcaacactc

SEQ ID NO: 32916 - RNA, 20 nt, African swine fever virus
  source 1..20: mol_type = genomic RNA
taggttatttgcggccgcaa

SEQ ID NO: 32917 - RNA, 20 nt, African swine fever virus
  source 1..20: mol_type = genomic RNA
cattatccacggtttcaatg

SEQ ID NO: 32918 - RNA, 20 nt, African swine fever virus
  source 1..20: mol_type = genomic RNA
gtagagtttactgcagcgga

SEQ ID NO: 32919 - RNA, 20 nt, African swine fever virus
  source 1..20: mol_type = genomic RNA
atcaatcctgtagagtttac

SEQ ID NO: 32920 - RNA, 20 nt, African swine fever virus
  source 1..20: mol_type = genomic RNA
ttgtccataagatcgtcgaa

SEQ ID NO: 32921 - RNA, 20 nt, African swine fever virus
  source 1..20: mol_type = genomic RNA
gaagcttatctatttcagta

SEQ ID NO: 32922 - RNA, 20 nt, African swine fever virus
  source 1..20: mol_type = genomic RNA
gtgaatagtttcgatgttgc

SEQ ID NO: 32923 - RNA, 20 nt, African swine fever virus
  source 1..20: mol_type = genomic RNA
cggcggctagattaacaggg

SEQ ID NO: 32924 - RNA, 20 nt, African swine fever virus
  source 1..20: mol_type = genomic RNA
ttgctgtagtgcgccgttaa

SEQ ID NO: 32925 - RNA, 20 nt, African swine fever virus
  source 1..20: mol_type = genomic RNA
accattgctgtagtgcgccg

SEQ ID NO: 32926 - RNA, 20 nt, African swine fever virus
  source 1..20: mol_type = genomic RNA
gccgaccattgctgtagtgc

SEQ ID NO: 32927 - RNA, 20 nt, African swine fever virus
  source 1..20: mol_type = genomic RNA
cctgccgaccattgctgtag

SEQ ID NO: 32928 - RNA, 20 nt, African swine fever virus
  source 1..20: mol_type = genomic RNA
ccgggttcattagggtcttc

SEQ ID NO: 32929 - RNA, 20 nt, African swine fever virus
  source 1..20: mol_type = genomic RNA
tgttgcatggtatggtaatg

SEQ ID NO: 32930 - RNA, 20 nt, African swine fever virus
  source 1..20: mol_type = genomic RNA
gtagtcatgtagcgtataat

SEQ ID NO: 32931 - RNA, 20 nt, African swine fever virus
  source 1..20: mol_type = genomic RNA
cttggtgcggtagctatcac

SEQ ID NO: 32932 - RNA, 20 nt, African swine fever virus
  source 1..20: mol_type = genomic RNA
gcttggtgcggtagctatca

SEQ ID NO: 32933 - RNA, 20 nt, African swine fever virus
  source 1..20: mol_type = genomic RNA
gagccgtgcacccgcttggt

SEQ ID NO: 32934 - RNA, 20 nt, African swine fever virus
  source 1..20: mol_type = genomic RNA
tgagccgtgcacccgcttgg

SEQ ID NO: 32935 - RNA, 20 nt, African swine fever virus
  source 1..20: mol_type = genomic RNA
ctgagccgtgcacccgcttg

SEQ ID NO: 32936 - RNA, 20 nt, African swine fever virus
  source 1..20: mol_type = genomic RNA
ttgatgatgggtgctatcac

SEQ ID NO: 32937 - RNA, 20 nt, African swine fever virus
  source 1..20: mol_type = genomic RNA
attgatgatgggtgctatca

SEQ ID NO: 32938 - RNA, 20 nt, African swine fever virus
  source 1..20: mol_type = genomic RNA
cgataatgtttcgctgggtt

SEQ ID NO: 32939 - RNA, 20 nt, African swine fever virus
  source 1..20: mol_type = genomic RNA
tactgcgattgagatcggag

SEQ ID NO: 32940 - RNA, 20 nt, African swine fever virus
  source 1..20: mol_type = genomic RNA
ggataagatgcgtgcacgcg

SEQ ID NO: 32941 - RNA, 20 nt, African swine fever virus
  source 1..20: mol_type = genomic RNA
gcggtacagacattggcggt

SEQ ID NO: 32942 - RNA, 20 nt, African swine fever virus
  source 1..20: mol_type = genomic RNA
gatctgatagaaggcgttgt

SEQ ID NO: 32943 - RNA, 20 nt, African swine fever virus
  source 1..20: mol_type = genomic RNA
ttcgtacaatgtccttgttg

SEQ ID NO: 32944 - RNA, 20 nt, African swine fever virus
  source 1..20: mol_type = genomic RNA
gaattctacttcgtctacca

SEQ ID NO: 32945 - RNA, 20 nt, African swine fever virus
  source 1..20: mol_type = genomic RNA
accagaattctacttcgtct

SEQ ID NO: 32946 - RNA, 20 nt, African swine fever virus
  source 1..20: mol_type = genomic RNA
acgtccaaccagaattctac

SEQ ID NO: 32947 - RNA, 20 nt, African swine fever virus
  source 1..20: mol_type = genomic RNA
accgacgtccaaccagaatt

SEQ ID NO: 32948 - RNA, 20 nt, African swine fever virus
  source 1..20: mol_type = genomic RNA
cgtctgcctaccctgatttg

SEQ ID NO: 32949 - RNA, 20 nt, African swine fever virus
  source 1..20: mol_type = genomic RNA
cccgtctgcctaccctgatt

SEQ ID NO: 32950 - RNA, 20 nt, African swine fever virus
  source 1..20: mol_type = genomic RNA
gttgggtatgacatagttat

SEQ ID NO: 32951 - RNA, 20 nt, African swine fever virus
  source 1..20: mol_type = genomic RNA
caatggtattaagcccgttg

SEQ ID NO: 32952 - RNA, 20 nt, African swine fever virus
  source 1..20: mol_type = genomic RNA
tagatcatataggccacaat

SEQ ID NO: 32953 - RNA, 20 nt, African swine fever virus
  source 1..20: mol_type = genomic RNA
ccgtagatcatataggccac

SEQ ID NO: 32954 - RNA, 20 nt, African swine fever virus
  source 1..20: mol_type = genomic RNA
cctgattgtagccgccgtag

SEQ ID NO: 32955 - RNA, 20 nt, African swine fever virus
  source 1..20: mol_type = genomic RNA
aacgactctatatcgctttc

SEQ ID NO: 32956 - RNA, 20 nt, African swine fever virus
  source 1..20: mol_type = genomic RNA
gtcgatgtatttgttgagtt

SEQ ID NO: 32957 - RNA, 20 nt, African swine fever virus
  source 1..20: mol_type = genomic RNA
tacatgacagaccggtcgat

SEQ ID NO: 32958 - RNA, 20 nt, African swine fever virus
  source 1..20: mol_type = genomic RNA
gctcatcgaagccgtacatg

SEQ ID NO: 32959 - RNA, 20 nt, African swine fever virus
  source 1..20: mol_type = genomic RNA
cgacggccggctcatcgaag

SEQ ID NO: 32960 - RNA, 20 nt, African swine fever virus
  source 1..20: mol_type = genomic RNA
ctgcgagaactcatcttgtc

SEQ ID NO: 32961 - RNA, 20 nt, African swine fever virus
  source 1..20: mol_type = genomic RNA
gctgcgagaactcatcttgt

SEQ ID NO: 32962 - RNA, 20 nt, African swine fever virus
  source 1..20: mol_type = genomic RNA
tgttcccgctgcgagaactc

SEQ ID NO: 32963 - RNA, 20 nt, African swine fever virus
  source 1..20: mol_type = genomic RNA
gcgccgcaatgcccttgttc

SEQ ID NO: 32964 - RNA, 20 nt, African swine fever virus
  source 1..20: mol_type = genomic RNA
gtagggcatttgctagacca

SEQ ID NO: 32965 - RNA, 20 nt, African swine fever virus
  source 1..20: mol_type = genomic RNA
tgtagggcatttgctagacc

SEQ ID NO: 32966 - RNA, 20 nt, African swine fever virus
  source 1..20: mol_type = genomic RNA
ttgaagcgtagaccttcttg

SEQ ID NO: 32967 - RNA, 20 nt, African swine fever virus
  source 1..20: mol_type = genomic RNA
tagcttgcaacggcgtatcg

SEQ ID NO: 32968 - RNA, 20 nt, African swine fever virus
  source 1..20: mol_type = genomic RNA
atagcttgcaacggcgtatc

SEQ ID NO: 32969 - RNA, 20 nt, African swine fever virus
  source 1..20: mol_type = genomic RNA
tgggcccatagcttgcaacg

SEQ ID NO: 32970 - RNA, 20 nt, African swine fever virus
  source 1..20: mol_type = genomic RNA
acggctggcctgtgagggca

SEQ ID NO: 32971 - RNA, 20 nt, African swine fever virus
  source 1..20: mol_type = genomic RNA
tccaacggctggcctgtgag

SEQ ID NO: 32972 - RNA, 20 nt, African swine fever virus
  source 1..20: mol_type = genomic RNA
ccgtgcgatcgtttgccgtc

SEQ ID NO: 32973 - RNA, 20 nt, African swine fever virus
  source 1..20: mol_type = genomic RNA
gacgaagacctccgtgcgat

SEQ ID NO: 32974 - RNA, 20 nt, African swine fever virus
  source 1..20: mol_type = genomic RNA
agacgaagacctccgtgcga

SEQ ID NO: 32975 - RNA, 20 nt, African swine fever virus
  source 1..20: mol_type = genomic RNA
taagcacccaatgctccatt

SEQ ID NO: 32976 - RNA, 20 nt, African swine fever virus
  source 1..20: mol_type = genomic RNA
gcgccgtaagcacccaatgc

SEQ ID NO: 32977 - RNA, 20 nt, African swine fever virus
  source 1..20: mol_type = genomic RNA
tgcgccgtaagcacccaatg

SEQ ID NO: 32978 - RNA, 20 nt, African swine fever virus
  source 1..20: mol_type = genomic RNA
tccgagtcgtcgtgcgattt

SEQ ID NO: 32979 - RNA, 20 nt, African swine fever virus
  source 1..20: mol_type = genomic RNA
ggacatcacagttcatgcac

SEQ ID NO: 32980 - RNA, 20 nt, African swine fever virus
  source 1..20: mol_type = genomic RNA
atatcggcctggacatcaca

SEQ ID NO: 32981 - RNA, 20 nt, African swine fever virus
  source 1..20: mol_type = genomic RNA
tgccgatatcggcctggaca

SEQ ID NO: 32982 - RNA, 20 nt, African swine fever virus
  source 1..20: mol_type = genomic RNA
gaattacggcgtttgactat

SEQ ID NO: 32983 - RNA, 20 nt, African swine fever virus
  source 1..20: mol_type = genomic RNA
tcagcgaatcgttgttggag

SEQ ID NO: 32984 - RNA, 20 nt, African swine fever virus
  source 1..20: mol_type = genomic RNA
gtcagcgaatcgttgttgga

SEQ ID NO: 32985 - RNA, 20 nt, African swine fever virus
  source 1..20: mol_type = genomic RNA
aactttgtcgaggaatggcc

SEQ ID NO: 32986 - RNA, 20 nt, African swine fever virus
  source 1..20: mol_type = genomic RNA
caactttgtcgaggaatggc

SEQ ID NO: 32987 - RNA, 20 nt, African swine fever virus
  source 1..20: mol_type = genomic RNA
tctattgcaccagcgcactc

SEQ ID NO: 32988 - RNA, 20 nt, African swine fever virus
  source 1..20: mol_type = genomic RNA
ttctattgcaccagcgcact

SEQ ID NO: 32989 - RNA, 20 nt, African swine fever virus
  source 1..20: mol_type = genomic RNA
atatgccattccggcagtta

SEQ ID NO: 32990 - RNA, 20 nt, African swine fever virus
  source 1..20: mol_type = genomic RNA
aaccattggtatgtgattaa

SEQ ID NO: 32991 - RNA, 20 nt, African swine fever virus
  source 1..20: mol_type = genomic RNA
agattcccaaccattggtat

SEQ ID NO: 32992 - RNA, 20 nt, African swine fever virus
  source 1..20: mol_type = genomic RNA
gaatacctcactcgttacac

SEQ ID NO: 32993 - RNA, 20 nt, African swine fever virus
  source 1..20: mol_type = genomic RNA
acaatgtggcggagcacagc

SEQ ID NO: 32994 - RNA, 20 nt, African swine fever virus
  source 1..20: mol_type = genomic RNA
cagcggccctctacgtgcaa

SEQ ID NO: 32995 - RNA, 20 nt, African swine fever virus
  source 1..20: mol_type = genomic RNA
caacgcagctttaccgcagc

SEQ ID NO: 32996 - RNA, 20 nt, African swine fever virus
  source 1..20: mol_type = genomic RNA
tgcgggaggaagtgaactgt

SEQ ID NO: 32997 - RNA, 20 nt, African swine fever virus
  source 1..20: mol_type = genomic RNA
tgcagttgtcgtagatgaag

SEQ ID NO: 32998 - RNA, 20 nt, African swine fever virus
  source 1..20: mol_type = genomic RNA
gtatacagctacgacccaag

SEQ ID NO: 32999 - RNA, 20 nt, African swine fever virus
  source 1..20: mol_type = genomic RNA
gaatggatcgcgtcttacta

SEQ ID NO: 33000 - RNA, 20 nt, African swine fever virus
  source 1..20: mol_type = genomic RNA
atttaccagaatggatcgcg

SEQ ID NO: 33001 - RNA, 20 nt, African swine fever virus
  source 1..20: mol_type = genomic RNA
tgcattccgggatgctctat

SEQ ID NO: 33002 - RNA, 20 nt, African swine fever virus
  source 1..20: mol_type = genomic RNA
attctctgacgaacagaaga

SEQ ID NO: 33003 - RNA, 20 nt, African swine fever virus
  source 1..20: mol_type = genomic RNA
tatgaccgtcatgacggata

SEQ ID NO: 33004 - RNA, 20 nt, African swine fever virus
  source 1..20: mol_type = genomic RNA
accttatgaccgtcatgacg

SEQ ID NO: 33005 - RNA, 20 nt, African swine fever virus
  source 1..20: mol_type = genomic RNA
ctacggcttctccttgggag

SEQ ID NO: 33006 - RNA, 20 nt, African swine fever virus
  source 1..20: mol_type = genomic RNA
tgataacgttaattatcatg

SEQ ID NO: 33007 - RNA, 20 nt, African swine fever virus
  source 1..20: mol_type = genomic RNA
ttacaacaagcgtagggact

SEQ ID NO: 33008 - RNA, 20 nt, African swine fever virus
  source 1..20: mol_type = genomic RNA
gaacgatgactctttcgtag

SEQ ID NO: 33009 - RNA, 20 nt, African swine fever virus
  source 1..20: mol_type = genomic RNA
cctgaacgatgactctttcg

SEQ ID NO: 33010 - RNA, 20 nt, African swine fever virus
  source 1..20: mol_type = genomic RNA
aggtttgcgtccaagcatat

SEQ ID NO: 33011 - RNA, 20 nt, African swine fever virus
  source 1..20: mol_type = genomic RNA
ccaataatacgatacattat

SEQ ID NO: 33012 - RNA, 20 nt, African swine fever virus
  source 1..20: mol_type = genomic RNA
gtttccttactatacgtgaa

SEQ ID NO: 33013 - RNA, 20 nt, African swine fever virus
  source 1..20: mol_type = genomic RNA
gcctacctgtttccttacta

SEQ ID NO: 33014 - RNA, 20 nt, African swine fever virus
  source 1..20: mol_type = genomic RNA
cattgtttcgagccatagat

SEQ ID NO: 33015 - RNA, 20 nt, African swine fever virus
  source 1..20: mol_type = genomic RNA
tagcgccggtgtcggcgacc

SEQ ID NO: 33016 - RNA, 20 nt, African swine fever virus
  source 1..20: mol_type = genomic RNA
aggcaatgtttacatagtcc

SEQ ID NO: 33017 - RNA, 20 nt, African swine fever virus
  source 1..20: mol_type = genomic RNA
cggcttatttggacacggcc

SEQ ID NO: 33018 - RNA, 20 nt, African swine fever virus
  source 1..20: mol_type = genomic RNA
gagtttgtaacatagtgagc

SEQ ID NO: 33019 - RNA, 20 nt, African swine fever virus
  source 1..20: mol_type = genomic RNA
attgatggaagtttaattcc

SEQ ID NO: 33020 - RNA, 20 nt, African swine fever virus
  source 1..20: mol_type = genomic RNA
cacttagttaacagcataat

SEQ ID NO: 33021 - RNA, 20 nt, African swine fever virus
  source 1..20: mol_type = genomic RNA
tagcgtagacccagcacttt

SEQ ID NO: 33022 - RNA, 20 nt, African swine fever virus
  source 1..20: mol_type = genomic RNA
tcgatgaggccaatgaagcc

SEQ ID NO: 33023 - RNA, 20 nt, African swine fever virus
  source 1..20: mol_type = genomic RNA
aacaagcacgacacgtattg

SEQ ID NO: 33024 - RNA, 20 nt, African swine fever virus
  source 1..20: mol_type = genomic RNA
catgtttgtagaccactgcc

SEQ ID NO: 33025 - RNA, 20 nt, African swine fever virus
  source 1..20: mol_type = genomic RNA
cggcctccattatgtcgttt

SEQ ID NO: 33026 - RNA, 20 nt, African swine fever virus
  source 1..20: mol_type = genomic RNA
ccggttcctattactgtcat

SEQ ID NO: 33027 - RNA, 20 nt, African swine fever virus
  source 1..20: mol_type = genomic RNA
ggtacttacggtgctcgtcc

SEQ ID NO: 33028 - RNA, 20 nt, African swine fever virus
  source 1..20: mol_type = genomic RNA
gccgagatccgtgatcggta

SEQ ID NO: 33029 - RNA, 20 nt, African swine fever virus
  source 1..20: mol_type = genomic RNA
atctatatacacgtagaacg

SEQ ID NO: 33030 - RNA, 20 nt, African swine fever virus
  source 1..20: mol_type = genomic RNA
ttacctccaatctatataca

SEQ ID NO: 33031 - RNA, 20 nt, African swine fever virus
  source 1..20: mol_type = genomic RNA
ttatgcccaccgcaacctcc

SEQ ID NO: 33032 - RNA, 20 nt, African swine fever virus
  source 1..20: mol_type = genomic RNA
gggaagaacgcgtggcacag

SEQ ID NO: 33033 - RNA, 20 nt, African swine fever virus
  source 1..20: mol_type = genomic RNA
cctgggaagaacgcgtggca

SEQ ID NO: 33034 - RNA, 20 nt, African swine fever virus
  source 1..20: mol_type = genomic RNA
atgggttcgctgcggtgatt

SEQ ID NO: 33035 - RNA, 20 nt, African swine fever virus
  source 1..20: mol_type = genomic RNA
acctatgggttcgctgcggt

SEQ ID NO: 33036 - RNA, 20 nt, African swine fever virus
  source 1..20: mol_type = genomic RNA
gacctatgggttcgctgcgg

SEQ ID NO: 33037 - RNA, 20 nt, African swine fever virus
  source 1..20: mol_type = genomic RNA
tgcgacgatccatagaactt

SEQ ID NO: 33038 - RNA, 20 nt, African swine fever virus
  source 1..20: mol_type = genomic RNA
tccatgcggccctatactac

SEQ ID NO: 33039 - RNA, 20 nt, African swine fever virus
  source 1..20: mol_type = genomic RNA
tggatgaggccatccatgcg

SEQ ID NO: 33040 - RNA, 20 nt, African swine fever virus
  source 1..20: mol_type = genomic RNA
agccgacgtgtttgcgtctt

SEQ ID NO: 33041 - RNA, 20 nt, African swine fever virus
  source 1..20: mol_type = genomic RNA
cgcggagaagcaatatgcgt

SEQ ID NO: 33042 - RNA, 20 nt, African swine fever virus
  source 1..20: mol_type = genomic RNA
tgggctcatagaagcatcag

SEQ ID NO: 33043 - RNA, 20 nt, African swine fever virus
  source 1..20: mol_type = genomic RNA
gtgttacgacggccaaggaa

SEQ ID NO: 33044 - RNA, 20 nt, African swine fever virus
  source 1..20: mol_type = genomic RNA
aatacataacagaggcgacg

SEQ ID NO: 33045 - RNA, 20 nt, African swine fever virus
  source 1..20: mol_type = genomic RNA
atctcaagtacggtctatgg

SEQ ID NO: 33046 - RNA, 20 nt, African swine fever virus
  source 1..20: mol_type = genomic RNA
aatctcaagtacggtctatg

SEQ ID NO: 33047 - RNA, 20 nt, African swine fever virus
  source 1..20: mol_type = genomic RNA
caatctcaagtacggtctat

SEQ ID NO: 33048 - RNA, 20 nt, African swine fever virus
  source 1..20: mol_type = genomic RNA
ccaatctcaagtacggtcta

SEQ ID NO: 33049 - RNA, 20 nt, African swine fever virus
  source 1..20: mol_type = genomic RNA
cacaatgctacgcgaaccag

SEQ ID NO: 33050 - RNA, 20 nt, African swine fever virus
  source 1..20: mol_type = genomic RNA
gcatcatttcaggcggcggc

SEQ ID NO: 33051 - RNA, 20 nt, African swine fever virus
  source 1..20: mol_type = genomic RNA
accatgttcaatgcaggcac

SEQ ID NO: 33052 - RNA, 20 nt, African swine fever virus
  source 1..20: mol_type = genomic RNA
gctttcccggcacgtcatca

SEQ ID NO: 33053 - RNA, 20 nt, African swine fever virus
  source 1..20: mol_type = genomic RNA
ttatgatctatggaatggga

SEQ ID NO: 33054 - RNA, 20 nt, African swine fever virus
  source 1..20: mol_type = genomic RNA
atatgcgcgtcgccattatg

SEQ ID NO: 33055 - RNA, 20 nt, African swine fever virus
  source 1..20: mol_type = genomic RNA
gcaggacgcctatatgcgcg

SEQ ID NO: 33056 - RNA, 20 nt, African swine fever virus
  source 1..20: mol_type = genomic RNA
gtttgtggacgtcgtttaca

SEQ ID NO: 33057 - RNA, 20 nt, African swine fever virus
  source 1..20: mol_type = genomic RNA
agtttgtggacgtcgtttac

SEQ ID NO: 33058 - RNA, 20 nt, African swine fever virus
  source 1..20: mol_type = genomic RNA
cagtttgtggacgtcgttta

SEQ ID NO: 33059 - RNA, 20 nt, African swine fever virus
  source 1..20: mol_type = genomic RNA
ccagtttgtggacgtcgttt

SEQ ID NO: 33060 - RNA, 20 nt, African swine fever virus
  source 1..20: mol_type = genomic RNA
tgcggcgcgactttcggtgt

SEQ ID NO: 33061 - RNA, 20 nt, African swine fever virus
  source 1..20: mol_type = genomic RNA
ttgcggcgcgactttcggtg

SEQ ID NO: 33062 - RNA, 20 nt, African swine fever virus
  source 1..20: mol_type = genomic RNA
aatcatcaatgtccttacac

SEQ ID NO: 33063 - RNA, 20 nt, African swine fever virus
  source 1..20: mol_type = genomic RNA
tctcatccgggatcagcgtt

SEQ ID NO: 33064 - RNA, 20 nt, African swine fever virus
  source 1..20: mol_type = genomic RNA
gccgctcacccagagtgttc

SEQ ID NO: 33065 - RNA, 20 nt, African swine fever virus
  source 1..20: mol_type = genomic RNA
tctacggcggcgaagcccac

SEQ ID NO: 33066 - RNA, 20 nt, African swine fever virus
  source 1..20: mol_type = genomic RNA
cgggaatgttatacacgtaa

SEQ ID NO: 33067 - RNA, 20 nt, African swine fever virus
  source 1..20: mol_type = genomic RNA
taacacagttctgatactgc

SEQ ID NO: 33068 - RNA, 20 nt, African swine fever virus
  source 1..20: mol_type = genomic RNA
ggattcgaactcggtccaat

SEQ ID NO: 33069 - RNA, 20 nt, African swine fever virus
  source 1..20: mol_type = genomic RNA
aattaagcaacagagtgttc

SEQ ID NO: 33070 - RNA, 20 nt, African swine fever virus
  source 1..20: mol_type = genomic RNA
gaacattgtcccaattaagc

SEQ ID NO: 33071 - RNA, 20 nt, African swine fever virus
  source 1..20: mol_type = genomic RNA
tttatcatattaatgcggcc

SEQ ID NO: 33072 - RNA, 20 nt, African swine fever virus
  source 1..20: mol_type = genomic RNA
taagtagataacgcagcgtt

SEQ ID NO: 33073 - RNA, 20 nt, African swine fever virus
  source 1..20: mol_type = genomic RNA
ataagtagataacgcagcgt

SEQ ID NO: 33074 - RNA, 20 nt, African swine fever virus
  source 1..20: mol_type = genomic RNA
gcgcggattctcattggccc

SEQ ID NO: 33075 - RNA, 20 nt, African swine fever virus
  source 1..20: mol_type = genomic RNA
ttgtctcaatagtttcgagg

SEQ ID NO: 33076 - RNA, 20 nt, African swine fever virus
  source 1..20: mol_type = genomic RNA
tcaatgttgactttcaggcc

SEQ ID NO: 33077 - RNA, 20 nt, African swine fever virus
  source 1..20: mol_type = genomic RNA
agtaccatcaatgttgactt

SEQ ID NO: 33078 - RNA, 20 nt, African swine fever virus
  source 1..20: mol_type = genomic RNA
agaacctgggcattcctagt

SEQ ID NO: 33079 - RNA, 20 nt, African swine fever virus
  source 1..20: mol_type = genomic RNA
ggcatgaagttcctgagtgc

SEQ ID NO: 33080 - RNA, 20 nt, African swine fever virus
  source 1..20: mol_type = genomic RNA
caccgcctggcatgaagttc

SEQ ID NO: 33081 - RNA, 20 nt, African swine fever virus
  source 1..20: mol_type = genomic RNA
cgaattccacaccgcctggc

SEQ ID NO: 33082 - RNA, 20 nt, African swine fever virus
  source 1..20: mol_type = genomic RNA
gaggaacgatgcacctataa

SEQ ID NO: 33083 - RNA, 20 nt, African swine fever virus
  source 1..20: mol_type = genomic RNA
tgaggaacgatgcacctata

SEQ ID NO: 33084 - RNA, 20 nt, African swine fever virus
  source 1..20: mol_type = genomic RNA
gatggttattggcgtctttg

SEQ ID NO: 33085 - RNA, 20 nt, African swine fever virus
  source 1..20: mol_type = genomic RNA
tggactccagatggttattg

SEQ ID NO: 33086 - RNA, 20 nt, African swine fever virus
  source 1..20: mol_type = genomic RNA
tagtgatcaccgtggactcc

SEQ ID NO: 33087 - RNA, 20 nt, African swine fever virus
  source 1..20: mol_type = genomic RNA
gggtagtaggttgtgtttca

SEQ ID NO: 33088 - RNA, 20 nt, African swine fever virus
  source 1..20: mol_type = genomic RNA
gccagggatgaaccgccacg

SEQ ID NO: 33089 - RNA, 20 nt, African swine fever virus
  source 1..20: mol_type = genomic RNA
gtgtgcccaactttatgtaa

SEQ ID NO: 33090 - RNA, 20 nt, African swine fever virus
  source 1..20: mol_type = genomic RNA
tcatggagcctagcggccaa

SEQ ID NO: 33091 - RNA, 20 nt, African swine fever virus
  source 1..20: mol_type = genomic RNA
ctatcgtggaatcattcatc

SEQ ID NO: 33092 - RNA, 20 nt, African swine fever virus
  source 1..20: mol_type = genomic RNA
tgcttatcagcggatcagag

SEQ ID NO: 33093 - RNA, 20 nt, African swine fever virus
  source 1..20: mol_type = genomic RNA
cgattgcagtccgtgtctca

SEQ ID NO: 33094 - RNA, 20 nt, African swine fever virus
  source 1..20: mol_type = genomic RNA
atcctcgattgcagtccgtg

SEQ ID NO: 33095 - RNA, 20 nt, African swine fever virus
  source 1..20: mol_type = genomic RNA
atattggccgcctccttctg

SEQ ID NO: 33096 - RNA, 20 nt, African swine fever virus
  source 1..20: mol_type = genomic RNA
gatagcccatattggccgcc

SEQ ID NO: 33097 - RNA, 20 nt, African swine fever virus
  source 1..20: mol_type = genomic RNA
cttcgccgcagctcctgata

SEQ ID NO: 33098 - RNA, 20 nt, African swine fever virus
  source 1..20: mol_type = genomic RNA
tccacttcgccgcagctcct

SEQ ID NO: 33099 - RNA, 20 nt, African swine fever virus
  source 1..20: mol_type = genomic RNA
ttccacttcgccgcagctcc

SEQ ID NO: 33100 - RNA, 20 nt, African swine fever virus
  source 1..20: mol_type = genomic RNA
tagtagggacaggcccggca

SEQ ID NO: 33101 - RNA, 20 nt, African swine fever virus
  source 1..20: mol_type = genomic RNA
gagtctgccgtagtagggac

SEQ ID NO: 33102 - RNA, 20 nt, African swine fever virus
  source 1..20: mol_type = genomic RNA
gtagcgtggaggattggtag

SEQ ID NO: 33103 - RNA, 20 nt, African swine fever virus
  source 1..20: mol_type = genomic RNA
ctatgccttctcgcagatag

SEQ ID NO: 33104 - RNA, 20 nt, African swine fever virus
  source 1..20: mol_type = genomic RNA
gcctctatgccttctcgcag

SEQ ID NO: 33105 - RNA, 20 nt, African swine fever virus
  source 1..20: mol_type = genomic RNA
atttgggcgcggctaccatt

SEQ ID NO: 33106 - RNA, 20 nt, African swine fever virus
  source 1..20: mol_type = genomic RNA
gtttaatatcacgggtgaat

SEQ ID NO: 33107 - RNA, 20 nt, African swine fever virus
  source 1..20: mol_type = genomic RNA
actccgcgtatagctccctg

SEQ ID NO: 33108 - RNA, 20 nt, African swine fever virus
  source 1..20: mol_type = genomic RNA
tggtctaccaactccgcgta

SEQ ID NO: 33109 - RNA, 20 nt, African swine fever virus
  source 1..20: mol_type = genomic RNA
cttggtctaccaactccgcg

SEQ ID NO: 33110 - RNA, 20 nt, African swine fever virus
  source 1..20: mol_type = genomic RNA
gtcgcggcagggttgagtga

SEQ ID NO: 33111 - RNA, 20 nt, African swine fever virus
  source 1..20: mol_type = genomic RNA
cgtttagttccggaacctct

SEQ ID NO: 33112 - RNA, 20 nt, African swine fever virus
  source 1..20: mol_type = genomic RNA
gcttgttcagcggtctgcat

SEQ ID NO: 33113 - RNA, 20 nt, African swine fever virus
  source 1..20: mol_type = genomic RNA
atccagtttatcggataggc

SEQ ID NO: 33114 - RNA, 20 nt, African swine fever virus
  source 1..20: mol_type = genomic RNA
gatccagtttatcggatagg

SEQ ID NO: 33115 - RNA, 20 nt, African swine fever virus
  source 1..20: mol_type = genomic RNA
cgatccagtttatcggatag

SEQ ID NO: 33116 - RNA, 20 nt, African swine fever virus
  source 1..20: mol_type = genomic RNA
tagcgtatggcgtgacgtgc

SEQ ID NO: 33117 - RNA, 20 nt, African swine fever virus
  source 1..20: mol_type = genomic RNA
gcgtaccatagcgtatggcg

SEQ ID NO: 33118 - RNA, 20 nt, African swine fever virus
  source 1..20: mol_type = genomic RNA
tgcgtaccatagcgtatggc

SEQ ID NO: 33119 - RNA, 20 nt, African swine fever virus
  source 1..20: mol_type = genomic RNA
aggaagtctctcgctgcggg

SEQ ID NO: 33120 - RNA, 20 nt, African swine fever virus
  source 1..20: mol_type = genomic RNA
tccaaggaagtctctcgctg

SEQ ID NO: 33121 - RNA, 20 nt, African swine fever virus
  source 1..20: mol_type = genomic RNA
tttataccatgtgtcgaacc

SEQ ID NO: 33122 - RNA, 20 nt, African swine fever virus
  source 1..20: mol_type = genomic RNA
ggtccgacacctggtaaggc

SEQ ID NO: 33123 - RNA, 20 nt, African swine fever virus
  source 1..20: mol_type = genomic RNA
cgggttgtccaatcttgcaa

SEQ ID NO: 33124 - RNA, 20 nt, African swine fever virus
  source 1..20: mol_type = genomic RNA
ccaacaccacgggttgtcca

SEQ ID NO: 33125 - RNA, 20 nt, African swine fever virus
  source 1..20: mol_type = genomic RNA
gggataaggcccgccaacac

SEQ ID NO: 33126 - RNA, 20 nt, African swine fever virus
  source 1..20: mol_type = genomic RNA
gatgaatatcaatggcaaca

SEQ ID NO: 33127 - RNA, 20 nt, African swine fever virus
  source 1..20: mol_type = genomic RNA
tgatgaatatcaatggcaac

SEQ ID NO: 33128 - RNA, 20 nt, African swine fever virus
  source 1..20: mol_type = genomic RNA
acagcctttccatgggcgtc

SEQ ID NO: 33129 - RNA, 20 nt, African swine fever virus
  source 1..20: mol_type = genomic RNA
tagcttcggccatcgcgttg

SEQ ID NO: 33130 - RNA, 20 nt, African swine fever virus
  source 1..20: mol_type = genomic RNA
ttctccacttaagattgtgc

SEQ ID NO: 33131 - RNA, 20 nt, African swine fever virus
  source 1..20: mol_type = genomic RNA
ttggcatatccaggccagta

SEQ ID NO: 33132 - RNA, 20 nt, African swine fever virus
  source 1..20: mol_type = genomic RNA
atatgtgcggtaattcttgg

SEQ ID NO: 33133 - RNA, 20 nt, African swine fever virus
  source 1..20: mol_type = genomic RNA
ctttcccatatgtgcggtaa

SEQ ID NO: 33134 - RNA, 20 nt, African swine fever virus
  source 1..20: mol_type = genomic RNA
tagatgcatatccacatgaa

SEQ ID NO: 33135 - RNA, 20 nt, African swine fever virus
  source 1..20: mol_type = genomic RNA
cctatgagggttaattattt

SEQ ID NO: 33136 - RNA, 20 nt, African swine fever virus
  source 1..20: mol_type = genomic RNA
cgtattgcggccttcatcac

SEQ ID NO: 33137 - RNA, 20 nt, African swine fever virus
  source 1..20: mol_type = genomic RNA
catgtattgttggcaacaat

SEQ ID NO: 33138 - RNA, 20 nt, African swine fever virus
  source 1..20: mol_type = genomic RNA
gtgtataagtatcttatgaa

SEQ ID NO: 33139 - RNA, 20 nt, African swine fever virus
  source 1..20: mol_type = genomic RNA
ctggcgatgatgttagcggc

SEQ ID NO: 33140 - RNA, 20 nt, African swine fever virus
  source 1..20: mol_type = genomic RNA
gctcctctggcgatgatgtt

SEQ ID NO: 33141 - RNA, 20 nt, African swine fever virus
  source 1..20: mol_type = genomic RNA
acattatgtcgcccaatata

SEQ ID NO: 33142 - RNA, 20 nt, African swine fever virus
  source 1..20: mol_type = genomic RNA
atttaccaacattatgtcgc

SEQ ID NO: 33143 - RNA, 20 nt, African swine fever virus
  source 1..20: mol_type = genomic RNA
tgtatctttaatgatcgtag

SEQ ID NO: 33144 - RNA, 20 nt, African swine fever virus
  source 1..20: mol_type = genomic RNA
acctatatttggcagatcac

SEQ ID NO: 33145 - RNA, 20 nt, African swine fever virus
  source 1..20: mol_type = genomic RNA
cgatggtaataagtattcca

SEQ ID NO: 33146 - RNA, 20 nt, African swine fever virus
  source 1..20: mol_type = genomic RNA
tcgatggtaataagtattcc

SEQ ID NO: 33147 - RNA, 20 nt, African swine fever virus
  source 1..20: mol_type = genomic RNA
ttgattccctcgatggtaat

SEQ ID NO: 33148 - RNA, 20 nt, African swine fever virus
  source 1..20: mol_type = genomic RNA
caccattgattccctcgatg

SEQ ID NO: 33149 - RNA, 20 nt, African swine fever virus
  source 1..20: mol_type = genomic RNA
acaccattgattccctcgat

SEQ ID NO: 33150 - RNA, 20 nt, African swine fever virus
  source 1..20: mol_type = genomic RNA
gtggtcgtgtctggattagg

SEQ ID NO: 33151 - RNA, 20 nt, African swine fever virus
  source 1..20: mol_type = genomic RNA
ccggtggtcgtgtctggatt

SEQ ID NO: 33152 - RNA, 20 nt, African swine fever virus
  source 1..20: mol_type = genomic RNA
gcaatataaggccaccggtg

SEQ ID NO: 33153 - RNA, 20 nt, African swine fever virus
  source 1..20: mol_type = genomic RNA
tctgcttgagcatatgctaa

SEQ ID NO: 33154 - RNA, 20 nt, African swine fever virus
  source 1..20: mol_type = genomic RNA
tattaagagttgccggaata

SEQ ID NO: 33155 - RNA, 20 nt, African swine fever virus
  source 1..20: mol_type = genomic RNA
gcaacaggagagcctattca

SEQ ID NO: 33156 - RNA, 20 nt, African swine fever virus
  source 1..20: mol_type = genomic RNA
gctcgccagggccataaccc

SEQ ID NO: 33157 - RNA, 20 nt, African swine fever virus
  source 1..20: mol_type = genomic RNA
gaatcaagttcaccgtcgtt

SEQ ID NO: 33158 - RNA, 20 nt, African swine fever virus
  source 1..20: mol_type = genomic RNA
ggaatcaagttcaccgtcgt

SEQ ID NO: 33159 - RNA, 20 nt, African swine fever virus
  source 1..20: mol_type = genomic RNA
tagtagcggcagatacccag

SEQ ID NO: 33160 - RNA, 20 nt, African swine fever virus
  source 1..20: mol_type = genomic RNA
agcaagagctttactcctta

SEQ ID NO: 33161 - RNA, 20 nt, African swine fever virus
  source 1..20: mol_type = genomic RNA
caattaccaagcaagagctt

SEQ ID NO: 33162 - RNA, 20 nt, African swine fever virus
  source 1..20: mol_type = genomic RNA
acaattaccaagcaagagct

SEQ ID NO: 33163 - RNA, 20 nt, African swine fever virus
  source 1..20: mol_type = genomic RNA
tggattgcgaagctttgatt

SEQ ID NO: 33164 - RNA, 20 nt, African swine fever virus
  source 1..20: mol_type = genomic RNA
caacagtagcatgttatttc

SEQ ID NO: 33165 - RNA, 20 nt, African swine fever virus
  source 1..20: mol_type = genomic RNA
ataatgcccaaggttgcacg

SEQ ID NO: 33166 - RNA, 20 nt, African swine fever virus
  source 1..20: mol_type = genomic RNA
ataccatgaagcctcaatct

SEQ ID NO: 33167 - RNA, 20 nt, African swine fever virus
  source 1..20: mol_type = genomic RNA
cagacgttgattcatcatct

SEQ ID NO: 33168 - RNA, 20 nt, African swine fever virus
  source 1..20: mol_type = genomic RNA
acagacgttgattcatcatc

SEQ ID NO: 33169 - RNA, 20 nt, African swine fever virus
  source 1..20: mol_type = genomic RNA
cctatacagacattgtacaa

SEQ ID NO: 33170 - RNA, 20 nt, African swine fever virus
  source 1..20: mol_type = genomic RNA
aacaactcgtacacaatgtc

SEQ ID NO: 33171 - RNA, 20 nt, African swine fever virus
  source 1..20: mol_type = genomic RNA
cggctatcaggtacaagcat

SEQ ID NO: 33172 - RNA, 20 nt, African swine fever virus
  source 1..20: mol_type = genomic RNA
ttctatccgcggctatcagg

SEQ ID NO: 33173 - RNA, 20 nt, African swine fever virus
  source 1..20: mol_type = genomic RNA
tcgaactgcggcggcaggag

SEQ ID NO: 33174 - RNA, 20 nt, African swine fever virus
  source 1..20: mol_type = genomic RNA
aatttgctatcatatcacct

SEQ ID NO: 33175 - RNA, 20 nt, African swine fever virus
  source 1..20: mol_type = genomic RNA
taagaatggcggcagaagaa

SEQ ID NO: 33176 - RNA, 20 nt, African swine fever virus
  source 1..20: mol_type = genomic RNA
tcaacgaggccttaagaatg

SEQ ID NO: 33177 - RNA, 20 nt, African swine fever virus
  source 1..20: mol_type = genomic RNA
tgggtaagcatgtacttcaa

SEQ ID NO: 33178 - RNA, 20 nt, African swine fever virus
  source 1..20: mol_type = genomic RNA
ttgggtaagcatgtacttca

SEQ ID NO: 33179 - RNA, 20 nt, African swine fever virus
  source 1..20: mol_type = genomic RNA
ggtagatgctgctctattca

SEQ ID NO: 33180 - RNA, 20 nt, African swine fever virus
  source 1..20: mol_type = genomic RNA
tgctgtagaatcgcgggcct

SEQ ID NO: 33181 - RNA, 20 nt, African swine fever virus
  source 1..20: mol_type = genomic RNA
atgtagttcgcatgcttctg

SEQ ID NO: 33182 - RNA, 20 nt, African swine fever virus
  source 1..20: mol_type = genomic RNA
tatatgccttctccaacatg

SEQ ID NO: 33183 - RNA, 20 nt, African swine fever virus
  source 1..20: mol_type = genomic RNA
aattcaggactggcatattc

SEQ ID NO: 33184 - RNA, 20 nt, African swine fever virus
  source 1..20: mol_type = genomic RNA
tacaggacctctgtcggaag

SEQ ID NO: 33185 - RNA, 20 nt, African swine fever virus
  source 1..20: mol_type = genomic RNA
tattatctatagggtacacg

SEQ ID NO: 33186 - RNA, 20 nt, African swine fever virus
  source 1..20: mol_type = genomic RNA
ttgataagatgaatgtgtcc

SEQ ID NO: 33187 - RNA, 20 nt, African swine fever virus
  source 1..20: mol_type = genomic RNA
aatcgaagactgtcacgaca

SEQ ID NO: 33188 - RNA, 20 nt, African swine fever virus
  source 1..20: mol_type = genomic RNA
aatacgtaagctctatgacc

SEQ ID NO: 33189 - RNA, 20 nt, African swine fever virus
  source 1..20: mol_type = genomic RNA
tcataggagctttggagagt

SEQ ID NO: 33190 - RNA, 20 nt, African swine fever virus
  source 1..20: mol_type = genomic RNA
tcaatgaagctctaagaatg

SEQ ID NO: 33191 - RNA, 20 nt, African swine fever virus
  source 1..20: mol_type = genomic RNA
atcaatgaagctctaagaat

SEQ ID NO: 33192 - RNA, 20 nt, African swine fever virus
  source 1..20: mol_type = genomic RNA
tgagtttgacattcgtccgg

SEQ ID NO: 33193 - RNA, 20 nt, African swine fever virus
  source 1..20: mol_type = genomic RNA
ttacgacctgattcataagt

SEQ ID NO: 33194 - RNA, 20 nt, African swine fever virus
  source 1..20: mol_type = genomic RNA
ctacgccgtcgtaggagctc

SEQ ID NO: 33195 - RNA, 20 nt, African swine fever virus
  source 1..20: mol_type = genomic RNA
gctacgccgtcgtaggagct

SEQ ID NO: 33196 - RNA, 20 nt, African swine fever virus
  source 1..20: mol_type = genomic RNA
cgctacgccgtcgtaggagc

SEQ ID NO: 33197 - RNA, 20 nt, African swine fever virus
  source 1..20: mol_type = genomic RNA
tccatatcaatgaagcactc

SEQ ID NO: 33198 - RNA, 20 nt, African swine fever virus
  source 1..20: mol_type = genomic RNA
atccatatcaatgaagcact

SEQ ID NO: 33199 - RNA, 20 nt, African swine fever virus
  source 1..20: mol_type = genomic RNA
gatacttgttcaacaggaac

SEQ ID NO: 33200 - RNA, 20 nt, African swine fever virus
  source 1..20: mol_type = genomic RNA
tcagcgtatcgagaagaacc

SEQ ID NO: 33201 - RNA, 20 nt, African swine fever virus
  source 1..20: mol_type = genomic RNA
ttcagcgtatcgagaagaac

SEQ ID NO: 33202 - RNA, 20 nt, African swine fever virus
  source 1..20: mol_type = genomic RNA
aagggctcctccactttgtg

SEQ ID NO: 33203 - RNA, 20 nt, African swine fever virus
  source 1..20: mol_type = genomic RNA
aagctacgttgctaacgcaa

SEQ ID NO: 33204 - RNA, 20 nt, African swine fever virus
  source 1..20: mol_type = genomic RNA
tctccaagagggatctgact

SEQ ID NO: 33205 - RNA, 20 nt, African swine fever virus
  source 1..20: mol_type = genomic RNA
atggcagaggtatgatgtcc

SEQ ID NO: 33206 - RNA, 20 nt, African swine fever virus
  source 1..20: mol_type = genomic RNA
tatttgaactagcatgccta

SEQ ID NO: 33207 - RNA, 20 nt, African swine fever virus
  source 1..20: mol_type = genomic RNA
agaagagctgtctatgagag

SEQ ID NO: 33208 - RNA, 20 nt, African swine fever virus
  source 1..20: mol_type = genomic RNA
ttgattcaagacgcgaatac

SEQ ID NO: 33209 - RNA, 20 nt, African swine fever virus
  source 1..20: mol_type = genomic RNA
gcagggtgatcaatatgacc

SEQ ID NO: 33210 - RNA, 20 nt, African swine fever virus
  source 1..20: mol_type = genomic RNA
acgaggccttaagaatggcg

SEQ ID NO: 33211 - RNA, 20 nt, African swine fever virus
  source 1..20: mol_type = genomic RNA
catactcatacgacgggatc

SEQ ID NO: 33212 - RNA, 20 nt, African swine fever virus
  source 1..20: mol_type = genomic RNA
ttcaacgcataggagacgac

SEQ ID NO: 33213 - RNA, 20 nt, African swine fever virus
  source 1..20: mol_type = genomic RNA
aaggcgacgcaacagtaata

SEQ ID NO: 33214 - RNA, 20 nt, African swine fever virus
  source 1..20: mol_type = genomic RNA
taaggcgacgcaacagtaat

SEQ ID NO: 33215 - RNA, 20 nt, African swine fever virus
  source 1..20: mol_type = genomic RNA
ctaaggcgacgcaacagtaa

SEQ ID NO: 33216 - RNA, 20 nt, African swine fever virus
  source 1..20: mol_type = genomic RNA
tgattaacgccacatcaaga

SEQ ID NO: 33217 - RNA, 20 nt, African swine fever virus
  source 1..20: mol_type = genomic RNA
attcggtgaacagccttatt

SEQ ID NO: 33218 - RNA, 20 nt, African swine fever virus
  source 1..20: mol_type = genomic RNA
cattcggtgaacagccttat

SEQ ID NO: 33219 - RNA, 20 nt, African swine fever virus
  source 1..20: mol_type = genomic RNA
aactttcgacacagctcctg

SEQ ID NO: 33220 - RNA, 20 nt, African swine fever virus
  source 1..20: mol_type = genomic RNA
tctttagctcctaactttcg

SEQ ID NO: 33221 - RNA, 20 nt, African swine fever virus
  source 1..20: mol_type = genomic RNA
gcacatttagagcttccaac

SEQ ID NO: 33222 - RNA, 20 nt, African swine fever virus
  source 1..20: mol_type = genomic RNA
gtatttaacgaatatgttca

SEQ ID NO: 33223 - RNA, 20 nt, African swine fever virus
  source 1..20: mol_type = genomic RNA
ataagctagcatgtagttat

SEQ ID NO: 33224 - RNA, 20 nt, African swine fever virus
  source 1..20: mol_type = genomic RNA
ggtttagtgtagtcttatta

SEQ ID NO: 33225 - RNA, 20 nt, African swine fever virus
  source 1..20: mol_type = genomic RNA
ttccgtagctcagcatcctt

SEQ ID NO: 33226 - RNA, 20 nt, African swine fever virus
  source 1..20: mol_type = genomic RNA
tgggtcgcagcccattccat

SEQ ID NO: 33227 - RNA, 20 nt, African swine fever virus
  source 1..20: mol_type = genomic RNA
tacctccgagtgtgtaacag

SEQ ID NO: 33228 - RNA, 20 nt, African swine fever virus
  source 1..20: mol_type = genomic RNA
gggattgtttatttgaatat

SEQ ID NO: 33229 - RNA, 20 nt, African swine fever virus
  source 1..20: mol_type = genomic RNA
tttatatggtcggcttccca

SEQ ID NO: 33230 - RNA, 20 nt, African swine fever virus
  source 1..20: mol_type = genomic RNA
tgataagaatgggtgcggat

SEQ ID NO: 33231 - RNA, 20 nt, African swine fever virus
  source 1..20: mol_type = genomic RNA
ggataacaacgtccgtgtca

SEQ ID NO: 33232 - RNA, 20 nt, African swine fever virus
  source 1..20: mol_type = genomic RNA
caggataacaacgtccgtgt

SEQ ID NO: 33233 - RNA, 20 nt, African swine fever virus
  source 1..20: mol_type = genomic RNA
cgcatattcaggtgaagctc

SEQ ID NO: 33234 - RNA, 20 nt, African swine fever virus
  source 1..20: mol_type = genomic RNA
tatacgacatcgtcagacgc

SEQ ID NO: 33235 - RNA, 20 nt, African swine fever virus
  source 1..20: mol_type = genomic RNA
gttcacgcagatttgttgaa

SEQ ID NO: 33236 - RNA, 20 nt, African swine fever virus
  source 1..20: mol_type = genomic RNA
atatctcatcatctgtgcta

SEQ ID NO: 33237 - RNA, 20 nt, African swine fever virus
  source 1..20: mol_type = genomic RNA
tgtaggcgcaccagtattcg

SEQ ID NO: 33238 - RNA, 20 nt, African swine fever virus
  source 1..20: mol_type = genomic RNA
acgggacaccagacatgctt

SEQ ID NO: 33239 - RNA, 20 nt, African swine fever virus
  source 1..20: mol_type = genomic RNA
acgagctggcttgagacctg

SEQ ID NO: 33240 - RNA, 20 nt, African swine fever virus
  source 1..20: mol_type = genomic RNA
ttggatgaagttgtccaacg

SEQ ID NO: 33241 - RNA, 20 nt, African swine fever virus
  source 1..20: mol_type = genomic RNA
aagacctgattggccagcag

SEQ ID NO: 33242 - RNA, 20 nt, African swine fever virus
  source 1..20: mol_type = genomic RNA
gcctgagtaggtagtcctaa

SEQ ID NO: 33243 - RNA, 20 nt, African swine fever virus
  source 1..20: mol_type = genomic RNA
tcactatatgtgcactggtt

SEQ ID NO: 33244 - RNA, 20 nt, African swine fever virus
  source 1..20: mol_type = genomic RNA
taacatggtaatgcccattt

SEQ ID NO: 33245 - RNA, 20 nt, African swine fever virus
  source 1..20: mol_type = genomic RNA
atcggtgtggacgattgtga

SEQ ID NO: 33246 - RNA, 20 nt, African swine fever virus
  source 1..20: mol_type = genomic RNA
aatcggtgtggacgattgtg

SEQ ID NO: 33247 - RNA, 20 nt, African swine fever virus
  source 1..20: mol_type = genomic RNA
tcccaatcggtgtggacgat

SEQ ID NO: 33248 - RNA, 20 nt, African swine fever virus
  source 1..20: mol_type = genomic RNA
gctagcagcaagccgaggta

SEQ ID NO: 33249 - RNA, 20 nt, African swine fever virus
  source 1..20: mol_type = genomic RNA
gtagactagttagaccagct

SEQ ID NO: 33250 - RNA, 20 nt, African swine fever virus
  source 1..20: mol_type = genomic RNA
cttccaggagattgtcggtc

SEQ ID NO: 33251 - RNA, 20 nt, African swine fever virus
  source 1..20: mol_type = genomic RNA
tgggatagctatgctcctgt

SEQ ID NO: 33252 - RNA, 20 nt, African swine fever virus
  source 1..20: mol_type = genomic RNA
tctctaatatatttacactg

SEQ ID NO: 33253 - RNA, 20 nt, African swine fever virus
  source 1..20: mol_type = genomic RNA
acagataccatcttgacagt

SEQ ID NO: 33254 - RNA, 20 nt, African swine fever virus
  source 1..20: mol_type = genomic RNA
taggttaacaatttctgcca

SEQ ID NO: 33255 - RNA, 20 nt, African swine fever virus
  source 1..20: mol_type = genomic RNA
agattaacattgctcgatta

SEQ ID NO: 33256 - RNA, 20 nt, African swine fever virus
  source 1..20: mol_type = genomic RNA
atgactgtacaggttgggaa

SEQ ID NO: 33257 - RNA, 20 nt, African swine fever virus
  source 1..20: mol_type = genomic RNA
tctccaagtgaatcccatag

SEQ ID NO: 33258 - RNA, 20 nt, African swine fever virus
  source 1..20: mol_type = genomic RNA
catgtgaattcactcccaat

SEQ ID NO: 33259 - RNA, 20 nt, African swine fever virus
  source 1..20: mol_type = genomic RNA
gcacagctttcattaatgcg

SEQ ID NO: 33260 - RNA, 20 nt, African swine fever virus
  source 1..20: mol_type = genomic RNA
tattgacagtgactaagcta

SEQ ID NO: 33261 - RNA, 20 nt, African swine fever virus
  source 1..20: mol_type = genomic RNA
agtatgctccgtattgacag

SEQ ID NO: 33262 - RNA, 20 nt, African swine fever virus
  source 1..20: mol_type = genomic RNA
taacctagctagcatttcgt

SEQ ID NO: 33263 - RNA, 20 nt, African swine fever virus
  source 1..20: mol_type = genomic RNA
tactataccataacctagct

SEQ ID NO: 33264 - RNA, 20 nt, African swine fever virus
  source 1..20: mol_type = genomic RNA
catattagccgccaatcttt

SEQ ID NO: 33265 - RNA, 20 nt, African swine fever virus
  source 1..20: mol_type = genomic RNA
acatattagccgccaatctt

SEQ ID NO: 33266 - RNA, 20 nt, African swine fever virus
  source 1..20: mol_type = genomic RNA
ttgcccgattgatgttagcc

SEQ ID NO: 33267 - RNA, 20 nt, African swine fever virus
  source 1..20: mol_type = genomic RNA
aagtaaccattgcccgattg

SEQ ID NO: 33268 - RNA, 20 nt, African swine fever virus
  source 1..20: mol_type = genomic RNA
atacctagttagcatttcgt

SEQ ID NO: 33269 - RNA, 20 nt, African swine fever virus
  source 1..20: mol_type = genomic RNA
tactataccaatacctagtt

SEQ ID NO: 33270 - RNA, 20 nt, African swine fever virus
  source 1..20: mol_type = genomic RNA
acatattaaccgccaatctt

SEQ ID NO: 33271 - RNA, 20 nt, African swine fever virus
  source 1..20: mol_type = genomic RNA
cacatattaaccgccaatct

SEQ ID NO: 33272 - RNA, 20 nt, African swine fever virus
  source 1..20: mol_type = genomic RNA
attaatgtcagctcccaaca

SEQ ID NO: 33273 - RNA, 20 nt, African swine fever virus
  source 1..20: mol_type = genomic RNA
aggtaatcattgcccgatta

SEQ ID NO: 33274 - RNA, 20 nt, African swine fever virus
  source 1..20: mol_type = genomic RNA
attattcgtttgactcgcta

SEQ ID NO: 33275 - DNA, 402 bp, unidentified
  source 1..402: mol_type = unassigned DNA; note = RELA sequence
gctgtggccccgcctgcccctaaaaccaaccaggctggggaagggacactgacagaggccctgctgcagctgcagtttgatactgatgaggacctgggggccctgctcggcaataacactgacccgaccgtgttcacggacctggcatccgtcgacaactctgagtttcagcagctgctgaaccagggtgtatccatgcccccccacacagctgagcccatgctgatggagtaccctgaggctataactcgcttggtgacagggtcccagagaccccctgacccagctcccactcccctgggggcctctgggctcaccaacggtctcctctcgggggacgaagacttctcctccattgcggacatggacttctcagcccttctgagtcagatcagctcctaa

SEQ ID NO: 33276 - protein, 133 aa, unidentified
  source 1..133: note = RELA sequence
AVAPPAPKTNQAGEGTLTEALLQLQFDTDEDLGALLGNNTDPTVFTDLASVDNSEFQQLLNQGVSMPPHTAEPMLMEYPEAITRLVTGSQRPPDPAPTPLGASGLTNGLLSGDEDFSSIADMDFSALLSQISS

SEQ ID NO: 33277 - protein, 133 aa, Phacochoerus africanus
AVAPPAPKTNQAGEGTLTEALLQLQFDADEDLGALLGNNTDPTVFTDLASVDNSEFQQLLNQGVPMPPHTAEPMLMEYPEAITRLVTGSQRPPDPAPTPLGASGLTNGLLPGDEDFSSIADMDFSALLSQISS

SEQ ID NO: 33278 - DNA, 402 bp, Phacochoerus africanus
  source 1..402: mol_type = genomic DNA
gctgtggccccgcctgcccctaaaaccaaccaggctggggaagggacactgacagaggccctgctgcagctgcagtttgatgctgatgaggacctgggggccctgctcggcaataacactgacccgaccgtgttcacggacctggcatccgtcgacaactctgagtttcagcagctgctgaaccagggtgtacccatgcccccccacacagctgagcccatgctgatggagtaccctgaggctataactcgcttggtgacagggtcccagagaccccctgacccagctcccactcccctgggggcctctgggctcaccaacggtctcctcccgggggacgaagacttctcctccattgcggacatggacttctcagcccttctgagtcagatcagctcctaa

SEQ ID NO: 33279 - DNA, 402 bp, synthetic construct
  source 1..402: mol_type = other DNA
gctgtggccccgcctgcaccgaagacgaatcaagcaggtgtagggacactgacagaggccctgctgcagctgcagtttgatgctgatgaggacctgggggccctgctcggcaataacactgacccgaccgtgttcacggacctggcatccgtcgacaactctgagtttcagcagctgctgaaccagggtgtacccatgcccccccacacagctgagcccatgctgatggagtaccctgaggctataactcgcttggtgacagggtcccagagaccccctgacccagctcccactcccctgggggcctctgggctcaccaacggtctcctcccgggggacgaagacttctcatctatagctgatatggatttctcagcccttctgagtcagatcagctcctaa

SEQ ID NO: 33280 - DNA, 32 bp, unidentified
  source 1..32: mol_type = unassigned DNA; note = RELA sequence
gcagctgcagtttgatactgatgaggacctgg

SEQ ID NO: 33281 - protein, 10 aa, unidentified
  source 1..10: note = RELA sequence
QLQFDTDEDL

SEQ ID NO: 33282 - protein, 10 aa, Phacochoerus africanus
QLQFDADEDL

SEQ ID NO: 33283 - DNA, 32 bp, Phacochoerus africanus
  source 1..32: mol_type = genomic DNA
gcagctgcagtttgatgctgatgaggacctgg

SEQ ID NO: 33284 - DNA, 32 bp, synthetic construct; identical to SEQ ID NO: 33283
  source 1..32: mol_type = other DNA

SEQ ID NO: 33285 - skipped

SEQ ID NO: 33286 - DNA, 33 bp, unidentified
  source 1..33: mol_type = unassigned DNA; note = RELA sequence
gctgaaccagggtgtatccatgcccccccacac

SEQ ID NO: 33287 - protein, 11 aa, unidentified
  source 1..11: note = RELA sequence
LNQGVSMPPHT

SEQ ID NO: 33288 - protein, 11 aa, Phacochoerus africanus
LNQGVPMPPHT

SEQ ID NO: 33289 - DNA, 33 bp, Phacochoerus africanus
  source 1..33: mol_type = genomic DNA
gctgaaccagggtgtacccatgcccccccacac

SEQ ID NO: 33290 - DNA, 33 bp, synthetic construct; identical to SEQ ID NO: 33289
  source 1..33: mol_type = other DNA

SEQ ID NO: 33291 - DNA, 33 bp, synthetic construct
  source 1..33: mol_type = other DNA
tgctgaaccagggtgtacccatgcccccccaca

SEQ ID NO: 33292 - DNA, 32 bp, unidentified
  source 1..32: mol_type = unassigned DNA; note = RELA sequence
accaacggtctcctctcgggggacgaagactt

SEQ ID NO: 33293 - protein, 11 aa, unidentified
  source 1..11: note = RELA sequence
TNGLLSGDEDF

SEQ ID NO: 33294 - protein, 11 aa, Phacochoerus africanus
TNGLLPGDEDF

SEQ ID NO: 33295 - DNA, 32 bp, Phacochoerus africanus
  source 1..32: mol_type = genomic DNA
accaacggtctcctcccgggggacgaagactt

SEQ ID NO: 33296 - DNA, 32 bp, synthetic construct; identical to SEQ ID NO: 33295
  source 1..32: mol_type = other DNA

SEQ ID NO: 33297 - DNA, 34 bp, synthetic construct
  source 1..34: mol_type = other DNA
tcaccaacggtctcctcccgggggacgaagactt

SEQ ID NO: 33298 - DNA, 23 bp, Phacochoerus africanus
  source 1..23: mol_type = genomic DNA
cccctaaaaccaaccaggctggg

SEQ ID NO: 33299 - DNA, 23 bp, synthetic construct
  source 1..23: mol_type = other DNA
caccgaagacgaatcaagcaggt

SEQ ID NO: 33300 - DNA, 23 bp, Phacochoerus africanus
  source 1..23: mol_type = genomic DNA
cctccattgcggacatggacttc

SEQ ID NO: 33301 - DNA, 23 bp, synthetic construct
  source 1..23: mol_type = other DNA
catctatagctgatatggatttc

1.-61. (canceled)

62. A genetically modified cell exhibiting enhanced resistance to viral infection by African swine fever virus (ASFV) as compared to a control cell, the genetically modified cell comprising:
genetic modification of at least one endogenous gene selected from the group consisting of GGTA1, CMAH, and B4GALNT2, which genetic modification renders the enhanced resistance.

63. The genetically modified cell of claim 62, wherein the enhanced resistance to the viral infection is characterized by having reduced viral titer upon incubation with the ASFV, as compared to that of the control cell lacking the genetic modification.

64. The genetically modified cell of claim 62, wherein the at least one endogenous gene comprises two or more members selected from the group consisting of GGTA1, CMAH, and B4GALNT2.

65. The genetically modified cell of claim 62, wherein the at least one endogenous gene comprises GGTA1 and CMAH.

66. The genetically modified cell of claim 62, wherein the at least one endogenous gene comprises GGTA1 and B4GALNT2.

67. The genetically modified cell of claim 62, wherein the at least one endogenous gene comprises CMAH and B4GALNT2.

68. The genetically modified cell of claim 62, wherein the at least one endogenous gene comprises GGTA1, CMAH, and B4GALNT2.

69. The genetically modified cell of claim 62, further comprising an additional genetic modification of endogenous CD163.

70. The genetically modified cell of claim 62, further comprising an additional genetic modification of endogenous ANPEP.

71. The genetically modified cell of claim 62, further comprising an additional genetic modification of endogenous RELA.

72. The genetically modified cell of claim 62, wherein the at least one endogenous gene is a chromosomal gene.

73. The genetically modified cell of claim 62, wherein the at least one endogenous gene is a transcript of a chromosomal gene.

74. The genetically modified cell of claim 62, wherein the genetic modification comprises knockout of the at least one endogenous gene.

75. The genetically modified cell of claim 62, wherein the genetic modification renders enhanced resistance to viral infection by ASFV and an additional genus of virus.

76. The genetically modified cell of claim 62, wherein the genetic modification renders enhanced resistance to viral infection by ASFV, Betaarterivirus (PRRSV), and Alphacoronavirus (TGEV).

77. The genetically modified cell of claim 62, wherein the genetically modified cell is a non-human mammalian cell.

78. The genetically modified cell of claim 62, wherein the genetically modified cell is an artiodactyl cell.

79. The genetically modified cell of claim 62, wherein the genetically modified cell is a pig cell.
